(19) United States
(12) Patent Application Publication
(10) Pub. No.: US 2005/0227301 A1
(43) Pub. Date: Oct. 13, 2005

(54) Cell cycle progression proteins

(75) Inventors: David M. Glover, Cambridge (GB); Graham Bell, Dundee (GB); Lisa M. Frenz, Cambridgeshire (GB); Carol Midgley, Cambridgeshire (GB)

Correspondence Address: PALMER & DODGE, LLP;KATHLEEN M. WILLIAMS, 111 HUNTINGTON AVENUE, BOSTON, MA, 02199, US

(73) Assignee: Polgen

(21) Appl. No.: 10/745,237

(22) Filed: Dec. 23, 2003

Related U.S. Application Data
(60) Provisional application No. 60/468,402, filed on May 6, 2003.
(60) Provisional application No. 60/439,123, filed on Jan. 10, 2003.

(51) Int. Cl. G01N 33/574

(52) U.S. Cl. 435/7.23

(57) ABSTRACT

The invention describes human genes involved in cell cycle progression, including mitosis and meiosis. The invention also relates to the use of these “cell cycle progression” genes and proteins in the modulation of cell cycle progression in cells and methods for identifying modulators of these genes or proteins and hence modulators of mitosis and meiosis.

### RELATED APPLICATIONS

[0001] This application claims the benefit of U.S. Provisional Application No. 60/468,402, filed May 6, 2003 and U.S. Provisional Application No. 60/439,123, filed Jan. 10, 2003. The entire teachings of the above applications are incorporated herein by reference.

### BACKGROUND OF THE INVENTION

[0002] Proliferative growth of normal cells requires an orderly progression through a series of distinct steps, a process known as the cell cycle. Progression through the cell cycle is modulated by nutrient availability, cell size and growth factors through complex signalling pathways involving phosphorylation cascades and the strictly regulated expression and stability of specific proteins required at each phase of the cell cycle.

[0003] The phases of the cell cycle begin with the M phase, where cytoplasmic division (cytokinesis) occurs. The M phase is followed by the G1 phase, in which the cells resume a high rate of biosynthesis and growth. The S phase begins with DNA synthesis, and ends when the DNA content has doubled. The cell then enters the G2 phase, which ends when mitosis starts, signalled by the appearance of condensed chromosomes. Terminally differentiated cells are arrested in the G1 phase, and no longer undergo cell division.

[0004] The sequence of cell cycle events is rigorously controlled at specific checkpoints to ensure that each discrete stage in the cell cycle has been completed before the next is initiated. Human diseases associated with abnormal cell proliferation, including cancer, result when these rigorous controls on cell cycle progression are perturbed.

[0005] The elucidation of the genes and gene products involved in the cell cycle and its control will provide novel opportunities in the prophylactic, diagnostic and therapeutic management of cancer and other proliferation-related diseases (e.g., atherosclerosis).

[0006] On the other hand, it is also sometimes desirable to enhance proliferation of cells in a controlled manner. For example, proliferation of cells is useful in wound healing and where growth of tissue is desirable. Thus, identifying genes, their gene products and modulators which promote, enhance or deter the inhibition of proliferation is desirable.

[0007] Despite the desirability of identifying cell cycle components and modulators, there is a deficit of such compounds in the field. Accordingly, it would be advantageous to identify genes and their corresponding protein products whose activity is associated with cell cycle progression.

### SUMMARY OF THE INVENTION

[0008] We have now identified a number of human genes involved with cell cycle progression, for example the processes of mitosis and/or meiosis. Discovery of the role of these genes has been through assays configured to identify genes involved in cell cycle progression by knocking down gene expression using RNAi and assessing the resultant phenotype for abnormalities in cell cycle progression.

[0009] The invention features a method of identifying an agent that modulates the function of a cell cycle progression polypeptide of SEQ ID NOs:104-205, where the method includes: (a) providing a sample containing a cell cycle progression polypeptide of SEQ ID NOs:104-205, and a candidate agent; (b) measuring the binding of the cell cycle progression polypeptide of SEQ ID NOs:104-205 to the candidate agent in the sample; and (c) comparing the binding of the cell cycle progression polypeptide of SEQ ID NOs:104-205 to the candidate agent in the sample with the binding of the polypeptide of SEQ ID NOs:104-205 to a control agent, where the control agent is known to not bind to the polypeptide of SEQ ID NOs:104-205; where an increase in the binding of the cell cycle progression polypeptide of SEQ ID NOs:104-205 to the candidate agent in the sample relative to the binding of the cell cycle progression polypeptide of SEQ ID NOs:104-205 to the control agent indicates that the candidate agent modulates the function of the cell cycle progression polypeptide of SEQ ID NOs:104-205.

[0010] The invention also features a method of detecting the presence in a sample of a cell cycle progression polypeptide of SEQ ID NOs:104-205, where the method includes: (a) bringing the biological sample containing DNA or RNA into contact with a probe comprising a fragment of at least 15 nucleotides of a nucleic acid of SEQ ID NOs:1-103 under hybridizing conditions; and (b) detecting a duplex formed between the probe and nucleic acid in the sample; where detection of a duplex indicates the presence in the sample of a cell cycle progression polypeptide of SEQ ID NOs:104-205.

[0011] In another aspect, the invention features a method of detecting the presence in a sample of a cell cycle progression polypeptide of SEQ ID NOs:104-205, where the method includes: (a) providing an antibody capable of binding to the cell cycle progression polypeptide of SEQ ID NOs:104-205; (b) incubating a biological sample with said antibody under conditions which allow for the formation of an antibody-antigen complex; and (c) detecting an antibody-antigen complex comprising said antibody; where detection of an antibody-antigen complex indicates the presence in the sample of a cell cycle progression polypeptide of SEQ ID NOs:104-205.

[0012] In a further aspect, the invention features a method of modulating cell cycle progression in a cell, where the method includes: (a) transforming into the cell a double-stranded nucleic acid sequence of SEQ ID NOs:1-103 or a complement thereof, where the nucleic acid sequence is operably linked to a regulatory sequence; and (b) culturing the cell under conditions whereby the nucleic acid sequence is expressed; thereby modulating cell cycle progression in the cell.

[0013] The invention also features a method of modulating cell cycle progression in a cell, where the method includes: (a) transforming into the cell a double-stranded nucleic acid sequence encoding a polypeptide of SEQ ID NOs:104-205, where the nucleic acid sequence is operably linked to a regulatory sequence; and (b) culturing the cell under conditions whereby the nucleic acid sequence is expressed; thereby modulating cell cycle progression in the cell.

[0014] In an additional aspect, the invention features a method of modulating cell cycle progression in a cell, where the method includes: (a) transforming into the cell a double-stranded nucleic acid sequence encoding a polypeptide having at least 80% sequence identity with a polypeptide of SEQ ID NOs:104-205, where the nucleic acid sequence is operably linked to a regulatory sequence; and (b) culturing the cell under conditions whereby the nucleic acid sequence is expressed; thereby modulating cell cycle progression in the cell.

[0015] Another aspect of the invention features a method of modulating cell cycle progression in a cell, where the method includes: (a) transforming into the cell an isolated nucleic acid molecule comprising a regulatory sequence operably linked to a nucleic acid sequence that encodes a ribonucleic acid (RNA) precursor, where the precursor comprises: (i) a first stem portion comprising a 15 to 40 nucleotide long sequence that is identical to 15 to 40 consecutive nucleotides of a sequence of SEQ ID NOs:1-103; (ii) a second stem portion comprising a 15 to 40 nucleotide long sequence that is complementary to 15 to 40 consecutive nucleotides of a sequence of SEQ ID NOs:1-103, and where the first and second stem portions can hybridize with each other to form a duplex stem; and (iii) a loop portion that connects the two stem portions; (b) culturing the cell under conditions whereby the nucleic acid sequence is expressed; thereby modulating cell cycle progression in the cell.

[0016] In any of the methods described herein, the nucleic acid sequence is a nucleic acid sequence of SEQ ID NOs:1-103, or a complement thereof. The nucleic acid sequence can encode a polypeptide of SEQ ID NOs:104-205. The nucleic acid sequence can encode a polypeptide having 80% sequence identity to a polypeptide of SEQ ID NOs:104-205.

[0017] The methods described herein can be used to decrease cell cycle progression. The decrease can result in a decrease in proliferation of the cell.

[0018] The methods described herein can be used to increase cell cycle progression. The increase can result in a increase in proliferation of the cell.

[0019] Another feature of the invention is an RNA precursor encoded by a nucleic acid sequence of SEQ ID NOs:1-103. Such an RNA precursor can be included in a composition as a biologically active ingredient. Such an RNA precursor or composition can be used for treating a disease or condition characterized by cell proliferation in mammalian tissue, by contacting the tissue with the RNA precursor or composition. The disease can be cancer.

[0020] Another feature of the invention is a host cell transformed by the methods described herein. Such a host cell can contain all or a part of the nucleic acid sequences of SEQ ID NOs:1-103. Such a host cell can express all or a part of the polypeptide sequences of SEQ ID NOs:104-205.

[0021] The methods described herein can be used to provide a mammal with an anti-proliferative protein, where the method includes introducing into the mammal a mammalian cell transformed by the methods described herein.

[0022] The invention also features a pharmaceutical composition comprising, as an active ingredient, a cell cycle progression nucleic acid sequence of SEQ ID NOs:1-103, and a pharmaceutically-acceptable carrier.

[0023] The invention further features a pharmaceutical composition comprising, as an active ingredient, a cell cycle progression polypeptide of SEQ ID NOs:104-205, and a pharmaceutically-acceptable carrier.

[0024] The invention additionally features a pharmaceutical composition comprising, as an active ingredient, an antibody to a cell cycle progression nucleic acid sequence of SEQ ID NOs:1-103, and a pharmaceutically-acceptable carrier. Such an antibody can be used in a method for diagnosing a disease or condition characterized by cell proliferation in mammalian tissue, the method comprising contacting the tissue with the antibody, and detecting an antibody/antigen complex, wherein said detection is indicative of said disease or condition.

[0025] In another aspect, the invention features a pharmaceutical composition comprising, as an active ingredient, an antibody to a cell cycle progression polypeptide of SEQ ID NOs:104-205, and a pharmaceutically-acceptable carrier. Such an antibody can be used in a method for diagnosing a disease or condition characterized by cell proliferation in mammalian tissue, the method comprising contacting the tissue with the antibody, and detecting an antibody/antigen complex, wherein said detection is indicative of said disease or condition.

[0026] A further aspect of the invention features a method for treating a disease or condition characterized by cell proliferation in mammalian tissue, the method comprising contacting the tissue with an antagonist of a cell cycle progression polypeptide of SEQ ID NOs:104-205.

[0027] An additional aspect of the invention features a method for treating a disease or condition characterized by cell proliferation in mammalian tissue, the method comprising contacting the tissue with an agonist of a cell cycle progression polypeptide of SEQ ID NOs:104-205.

[0028] The invention also features a kit for treating a disease or condition characterized by cell proliferation in mammalian tissue, the kit comprising: (a) a polypeptide encoded by a nucleic acid sequence of SEQ ID NOs:1-103; (b) a nucleic acid having a nucleotide sequence of SEQ ID NOs:1-103; or (c) an antibody recognising an epitope of a polypeptide of (a).

[0029] An additional aspect of the invention is an array comprising at least two cell cycle progression genes having nucleic acid sequences of SEQ ID NOs:1-103. The nucleic acid sequences can be DNA sequences. The nucleic acid sequences can be RNA sequences.

[0030] Another aspect of the invention is an array comprising at least two cell cycle progression proteins having polypeptide sequences of SEQ ID NOs:104-205. Accordingly, in a first aspect, there is provided a method of modulating cell cycle progression in a cell comprising the step of increasing, decreasing or otherwise altering the functional activity of
[0031] i) a polypeptide having an amino acid sequence identified in Table 1;
[0032] ii) a polypeptide having an amino acid sequence encoded by a nucleic acid identified in Table 1;
[0033] iii) a polypeptide having at least 80% homology with i) or ii);
[0034] iv) a nucleic acid having a sequence identified in Table 1 or encoding a polypeptide having the sequence set out in any of i) to iii);
[0035] v) a nucleic acid which is capable of selectively hybridising to the sequence set out in iv); or
[0036] vi) the complement of iv) or v).

[0037] Suitably, the method comprises decreasing gene expression. In a preferred embodiment, the method comprises decreasing the nucleic acid functional activity by introducing a double stranded (dsRNA) corresponding to the nucleic acid, or an antisense RNA corresponding to the nucleic acid, or a fragment thereof, into the cell.

[0038] In another embodiment, the method comprises increasing the functional activity.

[0039] In a particularly preferred embodiment, the nucleic acid or polypeptide comprises a human nucleic acid or polypeptide as identified in Table 1.

[0040] In one embodiment, the method comprises:
[0041] a) providing an expression vector comprising a nucleic acid sequence; said nucleic acid sequence being selected from the group consisting of:
[0042] i) a nucleic acid having a sequence identified in Table 1;
[0043] ii) a nucleic acid which hybridises under stringent conditions to the sequence set out in i); or
[0044] iii) the complement of ii); and
[0045] b) introducing the expression vector into the cell and maintaining the cell under conditions permitting expression of the encoded polypeptide in the cell.

[0046] Knowledge of the genes involved in cell cycle progression allows the development of therapeutic agents for the treatment of medical conditions associated with aberrant cell cycle progression.

[0047] Accordingly, in a second aspect of the invention, there is provided a use of a nucleic acid identified in Table 1 or a polypeptide identified in Table 1 or a fragment thereof, in a method of prevention, treatment or diagnosis of a disease in an individual.

[0048] Suitably, the nucleic acid or polypeptide comprises a human nucleic acid or polypeptide identified in Table 1.

[0049] In one embodiment the nucleic acid or polypeptide is used to identify a substance capable of binding to the polypeptide, which method comprises incubating the polypeptide with a candidate substance under suitable conditions and determining whether the substance binds to the polypeptide.

[0050] In another embodiment, the nucleic acid or polypeptide is used to identify a substance capable of modulating the function of the polypeptide, the method comprising the steps of: incubating the polypeptide with a candidate substance and determining whether the activity of the polypeptide is thereby modulated.

[0051] Thus, the present invention provides the use of a cell cycle progression polypeptide encoded by a nucleic acid identified in Table 1 in an assay for identifying a substance capable of inhibiting cell cycle progression.

[0052] By “cell cycle progression” is meant any of the steps or stages in the cell cycle, for example, formation of the nuclear envelope, exit from the quiescent phase of the cell cycle (G0), G1 progression, chromosome decondensation, nuclear envelope breakdown, START, initiation of DNA replication, progression of DNA replication, termination of DNA replication, centrosome duplication, G2 progression, activation of mitotic or meiotic functions, chromosome condensation, centrosome separation, microtubule nucleation, spindle formation and function, interactions with microtubule motor proteins, chromatid separation and segregation, inactivation of mitotic functions, formation of contractile ring, and cytokinesis functions. Functions of the polynucleotides and polypeptides disclosed herein also include functions such as chromatin binding, formation of replication complexes, replication licensing, phosphorylation or other secondary modification activity, proteolytic degradation, microtubule binding, actin binding, septin binding, microtubule organising centre nucleation activity and binding to components of cell cycle signalling pathways. By saying that the “functional activity” of the polynucleotides and polypeptides disclosed herein is increased or decreased, it is meant that cell cycle progression is increased or decreased as a result of a change in one of these functions. Change in cell cycle progression can be measured by any of a number of standard assays, e.g., mitotic index.

[0053] The nucleic acid or polypeptide may be administered to an individual in need of such a treatment. Alternatively, or in addition, the substance identified by the method is administered to an individual in need of such treatment.

[0054] Also provided is a substance identified by the above uses. Such substances may be used in a method of therapy, such as in a method of affecting cell cycle progression, for example mitosis and/or meiosis.

[0055] The invention also provides a process comprising the steps of: (a) performing one of the above methods; and (b) preparing a quantity of those one or more substances identified as being capable of binding to a polypeptide of the invention.

[0056] Also provided is a process comprising the steps of: (a) performing one of the above methods; and (b) preparing a pharmaceutical composition comprising one or more substances identified as being capable of binding to a polypeptide of the invention.

[0057] The use may be for a method of diagnosis, in which the presence or absence of a nucleic acid is detected in a biological sample in a method comprising: (a) bringing the biological sample containing DNA or RNA into contact with a probe comprising a fragment of at least 15 nucleotides of the nucleic acid identified in Table 1 under hybridising conditions; and (b) detecting any duplex formed between the probe and nucleic acid in the sample.

[0058] Alternatively, or in addition, the absence or presence of a polypeptide is detected in a biological sample in a method comprising: (a) providing an antibody capable of binding to the polypeptide; (b) incubating a biological sample with said antibody under conditions which allow for the formation of an antibody-antigen complex; and (c) determining whether antibody-antigen complex comprising said antibody is formed.

[0059] In a particularly preferred embodiment, the disease comprises a disease associated with a defect in the cell cycle and, in particular, a proliferative disease such as cancer.

[0060] According to another aspect of the invention, there is provided a pharmaceutical composition comprising any one or more of the following: a polypeptide encoded by a nucleic acid identified in Table 1, or part thereof; a vector comprising a nucleic acid identified in Table 1; an antibody recognising an epitope of a polypeptide encoded by a nucleotide sequence identified in Table 1, together with a pharmaceutically acceptable carrier or diluent.

[0061] In one embodiment, the pharmaceutical composition is a vaccine composition.

[0062] In a further aspect, there is provided a nucleic acid identified in Table 1 for use in therapy.

[0063] In yet another aspect, there is provided a polypeptide encoded by a nucleic acid identified in Table 1 for use in therapy.

[0064] In a yet further aspect, there is provided an antibody capable of binding a polypeptide encoded by a nucleic acid identified in Table 1 for use in therapy.

[0065] Alternatively, in another aspect of the invention, there is provided a method of treating a patient suffering from a disease associated with enhanced activity of a cell cycle progression protein encoded by a nucleic acid identified in Table 1, which method comprises administering to the patient an antagonist of said cell cycle progression protein.

[0066] In another aspect there is provided a method of treating a patient suffering from a disease associated with reduced activity of a cell cycle progression protein encoded by a nucleic acid identified in Table 1, which method comprises administering to the patient an agonist of said cell cycle progression protein.

[0067] In an additional aspect, the invention provides kits comprising polynucleotides, polypeptides or antibodies of the invention and methods of using such kits in diagnosing the presence of absence of polynucleotides and polypeptides of the invention including deleterious mutant forms.

[0068] Accordingly, there is provided a diagnostic kit for a disease or susceptibility to a disease comprising any one or more of the following: a polypeptide encoded by a nucleic acid sequence identified in Table 1 or part thereof, a nucleic acid having a nucleotide sequence identified in Table 1; and an antibody recognising an epitope of a polypeptide encoded by a nucleic acid having a nucleotide sequence identified in Table 1.

[0069] In one embodiment, said diagnostic kit comprises an array, such as a nucleic acid or other microarray, comprising at least two cell cycle progression genes having nucleic acid sequences identified in Table 1, or fragments thereof. The fragments can be 15 nucleotides in length, or longer, up to the full length of the gene.

[0070] Suitably the disease or syndrome is one which is associated with abnormal cell cycle or proliferation such as cancer.

### DESCRIPTION OF THE DRAWINGS

[0071] FIG. 1 shows the nucleotide sequence for Drosophila gene CG3632 (GI 10728281), which has four transcripts, CT12163 (SEQ ID NO:1), CT13680 (SEQ ID NO:3), CT13700 (SEQ ID NO:5) and CT13718 (SEQ ID NO:7), which encode GI Acc. AAF48583 (SEQ ID NO:2), AAF48584 (SEQ ID NO:4), AAF48582 (SEQ ID NO:6) and AAF48581 (SEQ ID NO:8), respectively.

[0072] FIG. 2 shows the nucleotide sequence for Drosophila gene Pp1-87B (GI 7299572) (SEQ ID NO:9), which encodes protein GI Acc. AAF54810 (SEQ ID NO:10).

[0073] FIG. 3 shows the nucleotide sequence for Drosophila gene CG3524 (GI 10727365) (SEQ ID NO:11), which encodes protein GI Acc. AAF51149 (SEQ ID NO:12).

[0074] FIG. 4 shows the nucleotide sequence for Drosophila gene CG9311 (GI 10727923) (SEQ ID NO:13), which encodes protein GI Acc. AAF49705 (SEQ ID NO:14).

[0075] FIG. 5 shows the nucleotide sequence for Drosophila gene CG9092 (GI 7297037) (SEQ ID NO:15), which encodes protein GI Acc. AAF52321 (SEQ ID NO:16).

[0076] FIG. 6 shows the nucleotide sequence for Drosophila gene Arr1 (GI 10728850) (SEQ ID NO:17), which encodes protein GI Acc. AAF53644 (SEQ ID NO:18).

[0077] FIG. 7 shows the nucleotide sequence for Drosophila gene CG9150 (GI 7297037) (SEQ ID NO:19), which encodes protein GI Acc. AAF52338 (SEQ ID NO:20).

[0078] FIG. 8 shows the nucleotide sequence for Drosophila gene CG11102 (GI 10728232) (SEQ ID NO:21), which encodes protein GI Acc. AAF48320 (SEQ ID NO:22).

[0079] FIG. 9 shows the nucleotide sequence for Drosophila gene Smr (GI 7292788) (SEQ ID NO:23), which encodes protein GI Acc. AAF48196 (SEQ ID NO:24).

[0080] FIG. 10 shows the nucleotide sequence for Drosophila gene CG8045 (GI 7300335), which has three transcripts, CT24072 (SEQ ID NO:25), CT24102 (SEQ ID NO:27) and CT24092 (SEQ ID NO:29), which encode GI Acc. AAF55517 (SEQ ID NO:26), GI Acc. AAF55519 (SEQ ID NO:28) and GI Acc. AAF55523 (SEQ ID NO:30), respectively.

[0081] FIG. 11 shows the nucleotide sequence for Drosophila gene CG10420 (GI 7301280) (SEQ ID NO:31), which encodes protein GI Acc. AAF56422 (SEQ ID NO:32).

[0082] FIG. 12 shows the nucleotide sequence for Drosophila gene Hsc70-2 (GI 10726497) (SEQ ID NO:33), which encodes protein GI Acc. AAF54899 (SEQ ID NO:34).

[0083] FIG. 13 shows the nucleotide sequence for Drosophila gene CG10805 (GI 7297167) (SEQ ID NO:35), which encodes protein GI Acc. AAF52447 (SEQ ID NO:36).

[0084] FIG. 14 shows the nucleotide sequence for Drosophila gene eIF-4a (GI 7297037) (SEQ ID NO:37), which encodes protein GI Acc. AAF52317 (SEQ ID NO:38).

[0085] FIG. 15 shows the nucleotide sequence for Drosophila gene ACXA (GI 7297983) (SEQ ID NO:39), which encodes protein GI Acc. AAF53228 (SEQ ID NO:40).

[0086] FIG. 16 shows the nucleotide sequence for Drosophila gene CG15117 (GI 10727456) (SEQ ID NO:41), which encodes protein GI Acc. AAF57602 (SEQ ID NO:42).

[0087] FIG. 17 shows the nucleotide sequence for Drosophila gene BG:DS01759.2 (GI 7298121) (SEQ ID NO:43), which encodes protein GI Acc. AAF53376 (SEQ ID NO:44).

[0088] FIG. 18 shows the nucleotide sequence for Drosophila gene TepIII (GI 7297264) (SEQ ID NO:45), which encodes protein GI Acc. AAF52542 (SEQ ID NO:46).

[0089] FIG. 19 shows the nucleotide sequence for Drosophila gene Hsc70-4 (GI 10726541) (SEQ ID NO:47), which encodes protein GI Acc. AAF55150 (SEQ ID NO:48).

[0090] FIG. 20 shows the nucleotide sequence for Drosophila gene CG7069 (GI 10726692) (SEQ ID NO:49), which encodes protein GI Acc. AAF55980 (SEQ ID NO:50).

[0091] FIG. 21 shows the nucleotide sequence for Drosophila gene ACXE (GI 7297983) (SEQ ID NO:51), which encodes protein GI Acc. AAF53229 (SEQ ID NO:52).

[0092] FIG. 22 shows the nucleotide sequence for Drosophila gene EG:52C10.5 (GI 10727480) (SEQ ID NO:53), which encodes protein GI Acc. AAF57789 (SEQ ID NO:54).

[0093] FIG. 23 shows the nucleotide sequence for Drosophila gene gatA (GI 10726610) (SEQ ID NO:55), which encodes protein GI Acc. AAF55624 (SEQ ID NO:56).

[0094] FIG. 24 shows the nucleotide sequence for Drosophila gene CG17149 (GI 10727803), which has two transcripts, CT33310 (SEQ ID NO:57) and CT38086 (SEQ ID NO:59), which encode GI Acc. AAF49052 (SEQ ID NO:58) and GI Acc. AAF49051 (SEQ ID NO:60), respectively.

[0095] FIG. 25 shows the nucleotide sequence for Drosophila gene CG2905 (GI 10728163) (SEQ ID NO:61), which encodes protein GI Acc. AAF57342 (SEQ ID NO:62).

[0096] FIG. 26 shows the nucleotide sequence for Drosophila gene CG2336 (GI 10727121) (SEQ ID NO:63), which encodes protein GI Acc. AAF54111 (SEQ ID NO:64).

[0097] FIG. 27 shows the nucleotide sequence for Drosophila gene TER94 (GI 10727672), which has two transcripts, CT7768 (SEQ ID NO:65) and CT7776 (SEQ ID NO:67), which encode GI Acc. AAF58863 (SEQ ID NO:66) and GI Acc. AAF58864 (SEQ ID NO:68), respectively.

[0098] FIG. 28 shows the nucleotide sequence for Drosophila gene CG6313 (GI 10726739) (SEQ ID NO:69), which encodes protein GI Acc. AAF56267 (SEQ ID NO:70).

[0099] FIG. 29 shows the nucleotide sequence for Drosophila gene aur (GI 10726473) (SEQ ID NO:71), which encodes protein GI Acc. AAF54723 (SEQ ID NO:72).

[0100] FIG. 30 shows the nucleotide sequence for Drosophila gene Pk91C (GI 10799498) (SEQ ID NO:73), which encodes protein GI Acc. AAF55594 (SEQ ID NO:74).

[0101] FIG. 31 shows the nucleotide sequence for Drosophila gene Top2 (GI 10728874) (SEQ ID NO:75), which encodes protein GI Acc. AAF53802 (SEQ ID NO:76).

[0102] FIG. 32 shows the nucleotide sequence for Drosophila gene alpha-Est1 (GI 10727101) (SEQ ID NO:77), which encodes protein GI Acc. AAG22202 (SEQ ID NO:78).

[0103] FIG. 33 shows the nucleotide sequence for Drosophila gene Nrk (GI 10727582) (SEQ ID NO:79), which encodes protein GI Acc. AAF58420 (SEQ ID NO:80).

[0104] FIG. 34 shows the nucleotide sequence for Drosophila gene otk (GI 10727617) (SEQ ID NO:81), which encodes protein GI Acc. AAF58596 (SEQ ID NO:82).

[0105] FIG. 35 shows the nucleotide sequence for Drosophila gene cad (GI 10799497) (SEQ ID NO:83), which encodes protein GI Acc. AAF53923 (SEQ ID NO:84).

[0106] FIG. 36 shows the nucleotide sequence for Drosophila gene Rut (GI 10728252) (SEQ ID NO:85), which encodes protein GI Acc. AAF48388 (SEQ ID NO:86).

[0107] FIG. 37 shows the nucleotide sequence for Drosophila gene CG8002 (GI 10728334) (SEQ ID NO:87), which encodes protein GI Acc. AAF48942 (SEQ ID NO:88).

[0108] FIG. 38 shows the nucleotide sequence for Drosophila gene CG10335 (GI 10727968) (SEQ ID NO:89), which encodes protein GI Acc. AAF49936 (SEQ ID NO:90).

[0109] FIG. 39 shows the nucleotide sequence for Drosophila gene CG8070 (GI 10727693) (SEQ ID NO:91), which encodes protein GI Acc. AAF58986 (SEQ ID NO:92).

[0110] FIG. 40 shows the nucleotide sequence for Drosophila gene CG7460 (GI 10727853) (SEQ ID NO:93), which encodes protein GI Acc. AAF49310 (SEQ ID NO:94).

[0111] FIG. 41 shows the nucleotide sequence for Drosophila gene CG17735 (GI 10727172) (SEQ ID NO:95), which encodes protein GI Acc. AAF52092 (SEQ ID NO:96).

[0112] FIG. 42 shows the nucleotide sequence for Drosophila gene Gycalpha99B (GI 7301790) (SEQ ID NO:97), which encodes protein GI Acc. AAF56917 (SEQ ID NO:98).

[0113] FIG. 43 shows the nucleotide sequence for Drosophila gene CG13893 (GI 7291959) (SEQ ID NO:99), which encodes protein GI Acc. AAF47396 (SEQ ID NO:100).

[0114] FIG. 44 shows the nucleotide sequence for Drosophila gene CG18176 (GI 10728019) (SEQ ID NO:101), which encodes protein GI Acc. AAF50214 (SEQ ID NO:102).

[0115] FIG. 45 shows the nucleotide sequence for Drosophila gene CG8858 (GI 10727617) (SEQ ID NO:103), which encodes protein GI Acc. AAF58554 (SEQ ID NO:104).

[0116] FIG. 46 shows the nucleotide sequence for Drosophila gene Ac76E (GI 10733346) (SEQ ID NO:105), which encodes protein GI Acc. AAF49089 (SEQ ID NO:106).

[0117] FIG. 47 shows the nucleotide sequence for Drosophila gene CG17010 (GI 7297915) (SEQ ID NO:107), which encodes protein GI Acc. AAF53182 (SEQ ID NO:108).

[0118] FIG. 48 shows the nucleotide sequence for Drosophila gene Tkv (GI 7296952) (SEQ ID NO:109), which encodes protein GI Acc. AAF52230 (SEQ ID NO:110).

[0119] FIG. 49 shows the nucleotide sequence for Drosophila gene Dnt (GI 10728868) (SEQ ID NO:111), which encodes protein GI Acc. AAF53783 (SEQ ID NO:112).

[0120] FIG. 50 shows the nucleotide sequence for Drosophila gene ACXD (GI 10727242) (SEQ ID NO:113), which encodes protein GI Acc. AAF47621 (SEQ ID NO:114).

[0121] FIG. 51 shows the nucleotide sequence for Drosophila gene Aats-ala-m (GI 10728137) (SEQ ID NO:115), which encodes protein GI Acc. AAF50804 (SEQ ID NO:116).

[0122] FIG. 52 shows the nucleotide sequence for Drosophila gene Gek (GI 7291737) (SEQ ID NO:117), which encodes protein GI Acc. AAF47163 (SEQ ID NO:118).

[0123] FIG. 53 shows the nucleotide sequence for Drosophila gene CG3216 (GI 10726992) (SEQ ID NO:119), which encodes protein GI Acc. AAF46649 (SEQ ID NO:120).

[0124] FIG. 54 shows the nucleotide sequence for Drosophila gene CG5653 (GI 10728037) (SEQ ID NO:121), which encodes protein GI Acc. AAF50345 (SEQ ID NO:122).

[0125] FIG. 55 shows the nucleotide sequence for Drosophila gene CG17740 (GI 10727606) (SEQ ID NO:123), which encodes protein GI Acc. AAF58535 (SEQ ID NO:124).

[0126] FIG. 56 shows the nucleotide sequence for Drosophila gene TepI (GI 7298255) (SEQ ID NO:125), which encodes protein GI Acc. AAF53490 (SEQ ID NO:126).

[0127] FIG. 57 shows the nucleotide sequence for Drosophila gene for (GI 10727349), which has five transcripts, CT43154 (SEQ ID NO:127), CT42452 (SEQ ID NO:129), CT43152 (SEQ ID NO:131), CT43158 (SEQ ID NO:133) and CT43160 (SEQ ID NO:135), which encode GI Acc. AAF51082 (SEQ ID NO:128), GI Acc. AAG22251 (SEQ ID NO:130), GI Acc. AAG22252 (SEQ ID NO:132), GI Acc. AAG22253 (SEQ ID NO:134) and GI Acc. AAG22254 (SEQ ID NO:136), respectively.

[0128] FIG. 58 shows the nucleotide sequence for Drosophila gene Ac13E (GI 10728265) (SEQ ID NO:137), which encodes protein GI Acc. AAF48468 (SEQ ID NO:138).

[0129] FIG. 59 shows the nucleotide sequence for Drosophila gene CG2667 (GI 7298935) (SEQ ID NO:139), which encodes protein GI Acc. AAF54154 (SEQ ID NO:140).

[0130] FIG. 60 shows the nucleotide sequence for Drosophila gene CG7842 (GI 10727872) (SEQ ID NO:141), which encodes protein GI Acc. AAF49377 (SEQ ID NO:142).

[0131] FIG. 61 shows the nucleotide sequence for Drosophila gene CG17486 (GI 7289853) (SEQ ID NO:143), which encodes protein GI Acc. AAF45462 (SEQ ID NO:144).

[0132] FIG. 62 shows the nucleotide sequence for Drosophila gene CG6969 (GI 10726705) (SEQ ID NO:145), which encodes protein GI Acc. AAF56043 (SEQ ID NO:146).

[0133] FIG. 63 shows the nucleotide sequence for Drosophila gene CG12262 (GI 10728071) (SEQ ID NO:147), which encodes protein GI Acc. AAF50524 (SEQ ID NO:148).

[0134] FIG. 64 shows the nucleotide sequence for Drosophila gene Fray (GI 10726601) (SEQ ID NO:149), which encodes protein GI Acc. AAF55567 (SEQ ID NO:150).

[0135] FIG. 65 shows the nucleotide sequence for Drosophila gene CG6879 (GI 10726756) (SEQ ID NO:151), which encodes protein GI Acc. AAF56334 (SEQ ID NO:152).

[0136] FIG. 66 shows the nucleotide sequence for Drosophila gene CG11594 (GI 10727290) (SEQ ID NO:153), which encodes protein GI Acc. AAF47823 (SEQ ID NO:154).

[0137] FIG. 67 shows the nucleotide sequence for Drosophila gene S6kII (GI 10803726) (SEQ ID NO:155), which encodes protein GI Acc. AAF50945 (SEQ ID NO:156).

[0138] FIG. 68 shows the nucleotide sequence for Drosophila gene CG11714 (GI 10727982) (SEQ ID NO:157), which encodes protein GI Acc. AAF50053 (SEQ ID NO:158).

[0139] FIG. 69 shows the nucleotide sequence for Drosophila gene CG3534 (GI 7300193) (SEQ ID NO:159), which encodes protein GI Acc. AAF55371 (SEQ ID NO:160).

[0140] FIG. 70 shows the nucleotide sequence for Drosophila gene CG7335 (GI 10727803) (SEQ ID NO:161), which encodes protein GI Acc. AAF49067 (SEQ ID NO:162).

[0141] FIG. 71 shows the nucleotide sequence for Drosophila gene CG11275 (GI 7291355) (SEQ ID NO:163), which encodes protein GI Acc. AAF46814 (SEQ ID NO:164).

[0142] FIG. 72 shows the nucleotide sequence for Drosophila gene CG16726 (GI 10728019) (SEQ ID NO:165), which encodes protein GI Acc. AAF50229 (SEQ ID NO:166).

[0143] FIG. 73 shows the nucleotide sequence for Drosophila gene CG7514 (GI 10727313) (SEQ ID NO:167), which encodes protein GI Acc. AAF47931 (SEQ ID NO:168).

[0144] FIG. 74 shows the nucleotide sequence for Drosophila gene CG17283 (GI 7300241) (SEQ ID NO:169), which encodes protein GI Acc. AAF55416 (SEQ ID NO:170).

[0145] FIG. 75 shows the nucleotide sequence for Drosophila gene BcDNA:GH07626 (GI 10727365) (SEQ ID NO:171), which encodes protein GI Acc. AAF51148 (SEQ ID NO:172).

[0146] FIG. 76 shows the nucleotide sequence for Drosophila gene CG16752 (GI 10728478) (SEQ ID NO:173), which encodes protein GI Acc. AAF46037 (SEQ ID NO:174).

[0147] FIG. 77 shows the nucleotide sequence for Drosophila gene Rpt1 (GI 10727757) (SEQ ID NO:175), which encodes protein GI Acc. AAF59219 (SEQ ID NO:176).

[0148] FIG. 78 shows the nucleotide sequence for Drosophila gene Wts (GI 7301969) (SEQ ID NO:177), which encodes protein GI Acc. AAF57085 (SEQ ID NO:178).

[0149] FIG. 79 shows the nucleotide sequence for Drosophila gene CG1582 (GI 7292554) (SEQ ID NO:179), which encodes protein GI Acc. AAF47973 (SEQ ID NO:180).

[0150] FIG. 80 shows the nucleotide sequence for Drosophila gene CG12289 (GI 10727982) (SEQ ID NO:181), which encodes protein GI Acc. AAF50065 (SEQ ID NO:182).

[0151] FIG. 81 shows the nucleotide sequence for Drosophila gene Pepck (GI 10727469) (SEQ ID NO:183), which encodes protein GI Acc. AAF57676 (SEQ ID NO:184).

[0152] FIG. 82 shows the nucleotide sequence for Drosophila gene CG5665 (GI 10726906) (SEQ ID NO:185), which encodes protein GI Acc.-AAF51579 (SEQ ID NO:186).

[0153] FIG. 83 shows the nucleotide sequence for Drosophila gene CG7285 (GI 10727839) (SEQ ID NO:187), which encodes protein GI Acc. AAF49259 (SEQ ID NO:188).

[0154] FIG. 84 shows the nucleotide sequence for Drosophila gene Bt (GI 10726313) (SEQ ID NO:189), which encodes protein GI Acc. AAF59316 (SEQ ID NO:190).

[0155] FIG. 85 shows the nucleotide sequence for Drosophila gene CG8795 (GI 10726505) (SEQ ID NO:191), which encodes protein GI Acc. AAF54929 (SEQ ID NO:192).

[0156] FIG. 86 shows the nucleotide sequence for Drosophila gene CG10967 (GI 10727955) (SEQ ID NO:193), which encodes protein GI Acc. AAF49878 (SEQ ID NO:194).

[0157] FIG. 87 shows the nucleotide sequence for Drosophila gene CG3809 (GI 10726480) (SEQ ID NO:195), which encodes protein GI Acc. AAF54757 (SEQ ID NO:196).

[0158] FIG. 88 shows the nucleotide sequence for Drosophila gene Ack (GI 10727290) (SEQ ID NO:197), which encodes protein GI Acc. AAF47839 (SEQ ID NO:198).

[0159] FIG. 89 shows the nucleotide sequence for Drosophila gene Abl (GI 10727878) (SEQ ID NO:199), which encodes protein GI Acc. AAF49431 (SEQ ID NO:200).

[0160] FIG. 90 shows the nucleotide sequence for Drosophila gene CG7362 (GI 10726534) (SEQ ID NO:201), which encodes protein GI Acc. AAF55096 (SEQ ID NO:202).

[0161] FIG. 91 shows the nucleotide sequence for Drosophila gene Cyp9f2 (GI 7299572) (SEQ ID NO:203), which encodes protein GI Acc. AAF54803 (SEQ ID NO:204).

[0162] FIG. 92 shows the nucleic acid (SEQ ID NO:205) and amino acid (SEQ ID NO:206) sequence for the human homolog to Drosophila gene CG3632 (SWISS-PROT Ref. No. Q9UEG3).

[0163] FIG. 93 shows the nucleic acid (SEQ ID NO:207) and amino acid (SEQ ID NO:208) sequence for the human homolog to Drosophila gene Pp1-87B (SWISS-PROT Ref. No. P36873).

[0164] FIG. 94 shows the nucleic acid (SEQ ID NO:209) and amino acid (SEQ ID NO:210) sequence for the human homolog to Drosophila gene CG3524 (SWISS-PROT Ref. No. Q16702).

[0165] FIG. 95 shows the nucleic acid (SEQ ID NO:211) and amino acid (SEQ ID NO:212) sequence for the human homolog to Drosophila gene CG9311 (SWISS-PROT Ref. No. Q9H3S7).

[0166] FIG. 96 shows the nucleic acid (SEQ ID NO:213) and amino acid (SEQ ID NO:214) sequence for the human homolog to Drosophila gene CG9092 (SWISS-PROT Ref. No. P16278).

[0167] FIG. 97 shows the nucleic acid (SEQ ID NO:215) and amino acid (SEQ ID NO:216) sequence for the human homolog to Drosophila gene Arr1 (SWISS-PROT Ref. No. P49407).

[0168] FIG. 98 shows the nucleic acid (SEQ ID NO:217) and amino acid (SEQ ID NO:218) sequence for the human homolog to Drosophila gene CG9150 (SWISS-PROT Ref. No. Q9BUC7).

[0169] FIG. 99 shows the nucleic acid (SEQ ID NO:219) and amino acid (SEQ ID NO:220) sequence for the human homolog to Drosophila gene CG11102 (SWISS-PROT Ref. No. BAA31634).

[0170] FIG. 100 shows the nucleic acid (SEQ ID NO:221) and amino acid (SEQ ID NO:222) sequence for the human homolog to Drosophila gene Smr (SWISS-PROT Ref. No. 075376).

[0171] FIG. 101 shows the nucleic acid (SEQ ID NO:223) and amino acid (SEQ ID NO:224) sequence for the human homolog to Drosophila gene CG8045 (SWISS-PROT Ref. No. P42655).

[0172] FIG. 102 shows the nucleic acid (SEQ ID NO:225) and amino acid (SEQ ID NO:226) sequence for the human homolog to Drosophila gene CG10420 (SWISS-PROT Ref. No. Q9H173).

[0173] FIG. 103 shows the nucleic acid (SEQ ID NO:227) and amino acid (SEQ ID NO:228) sequence for the human homolog to Drosophila gene Hsc70-2 (SWISS-PROT Ref. No. P11142).

[0174] FIG. 104 shows the nucleic acid (SEQ ID NO:229) and amino acid (SEQ ID NO:230) sequence for the human homolog to Drosophila gene CG10805 (SWISS-PROT Ref. No. Q9H583).

[0175] FIG. 105 shows the nucleic acid (SEQ ID NO:231) and amino acid (SEQ ID NO:232) sequence for the human homolog to Drosophila gene eIF-4a (SWISS-PROT Ref. No. Q96EA8).

[0176] FIG. 106 shows the nucleic acid sequences (SEQ ID NO:233 and SEQ ID NO:235, respectively) and the amino acid sequences (SEQ ID NO:234 and SEQ ID NO:236, respectively) for the two human homologs to Drosophila gene ACXA (SWISS-PROT Ref. No. Q08462 and SWISS-PROT Ref. No. P40145).

[0177] FIG. 107 shows the nucleic acid (SEQ ID NO:237) and amino acid (SEQ ID NO:238) sequence for the human homolog to Drosophila gene CG15117 (SWISS-PROT Ref. No. P08236).

[0178] FIG. 108 shows the nucleic acid (SEQ ID NO:239) and amino acid (SEQ ID NO:240) sequence for the human homolog to Drosophila gene TepIII (SWISS-PROT Ref. No. Q8TDJ3).

[0179] FIG. 109 shows the nucleic acid (SEQ ID NO:241) and amino acid (SEQ ID NO:242) sequence for the human homolog to Drosophila gene Hsc70-4 (SWISS-PROT Ref. No. P11142).

[0180] FIG. 110 shows the nucleic acid (SEQ ID NO:243) and amino acid (SEQ ID NO:244) sequence for the human homolog to Drosophila gene CG7069 (SWISS-PROT Ref. No. P14786).

[0181] FIG. 111 shows the nucleic acid sequences (SEQ ID NO:245 and SEQ ID NO:247, respectively) and amino acid sequences (SEQ ID NO:246 and SEQ ID NO:248, respectively) for the two human homologs to Drosophila gene ACXE (SWISS-PROT Ref. No. P40145 and SWISS-PROT Ref. No. P51828).

[0182] FIG. 112 shows the nucleic acid (SEQ ID NO:249) and amino acid (SEQ ID NO:250) sequence for the human homolog to Drosophila gene EG:52C10.5 (SWISS-PROT Ref. No. Q9Y217).

[0183] FIG. 113 shows the nucleic acid (SEQ ID NO:251) and amino acid (SEQ ID NO:252) sequence for the human homolog to Drosophila gene gatA (SWISS-PROT Ref. No. Q9HOR6).

[0184] FIG. 114 shows the nucleic acid (SEQ ID NO:253) and amino acid (SEQ ID NO:254) sequence for the human homolog to Drosophila gene CG17149 (SWISS-PROT Ref. No. Q9NUH3).

[0185] FIG. 115 shows the nucleic acid (SEQ ID NO:255) and amino acid (SEQ ID NO:256) sequence for the human homolog to Drosophila gene CG2905 (SWISS-PROT Ref. No. Q9Y6H4).

[0186] FIG. 116 shows the nucleic acid (SEQ ID NO:257) and amino acid (SEQ ID NO:258) sequence for the human homolog to Drosophila gene TER94 (SWISS-PROT Ref. No. P55072).

[0187] FIG. 117 shows the nucleic acid (SEQ ID NO:259) and amino acid (SEQ ID NO:260) sequence for the human homolog to Drosophila gene CG6313 (SWISS-PROT Ref. No. BAA31672).

[0188] FIG. 118 shows the nucleic acid sequences (SEQ ID NO:261 and SEQ ID NO:263, respectively) and amino acid sequences (SEQ ID NO:262 and SEQ ID NO:264, respectively) for the two human homologs to Drosophila gene aur (SWISS-PROT Ref. No. 060445 and SWISS-PROT Ref. No. 060446).

[0189] FIG. 119 shows the nucleic acid (SEQ ID NO:265) and amino acid (SEQ ID NO:266) sequence for the human homolog to Drosophila gene Pk91C (SWISS-PROT Ref. No. Q96SJ5).

[0190] FIG. 120 shows the nucleic acid sequences (SEQ ID NO:267 and SEQ ID NO:269, respectively) and amino acid sequences (SEQ ID NO:268 and SEQ ID NO:270, respectively) for the two human homologs to Drosophila gene Top2 (SWISS-PROT Ref. No. P11388 and SWISS-PROT Ref. No. Q02880).

[0191] FIG. 121 shows the nucleic acid (SEQ ID NO:271) and amino acid (SEQ ID NO:272) sequence for the human homolog to Drosophila gene alpha-Est1 (SWISS-PROT Ref. No. P22303).

[0192] FIG. 122 shows the nucleic acid (SEQ ID NO:273) and amino acid (SEQ ID NO:274) sequence for the human homolog to Drosophila gene Nrk (SWISS-PROT Ref. No. 015146).

[0193] FIG. 123 shows the nucleic acid (SEQ ID NO:275) and amino acid (SEQ ID NO:276) sequence for the human homolog to Drosophila gene otk (SWISS-PROT Ref. No. Q13308).

[0194] FIG. 124 shows the nucleic acid (SEQ ID NO:277) and amino acid (SEQ ID NO:278) sequence for the human homolog to Drosophila gene cad (SWISS-PROT Ref. No. Q99626).

[0195] FIG. 125 shows the nucleic acid (SEQ ID NO:279) and amino acid (SEQ ID NO:280) sequence for the human homolog to Drosophila gene Rut (SWISS-PROT Ref. No. 043306).

[0196] FIG. 126 shows the nucleic acid (SEQ ID NO:281) and amino acid (SEQ ID NO:282) sequence for the human homolog to Drosophila gene CG8002 (SWISS-PROT Ref. No. BAC02708).

[0197] FIG. 127 shows the nucleic acid (SEQ ID NO:283) and amino acid (SEQ ID NO:284) sequence for the human homolog to Drosophila gene CG10335 (SWISS-PROT Ref. No. P13716).

[0198] FIG. 128 shows the nucleic acid (SEQ ID NO:285) and amino acid (SEQ ID NO:286) sequence for the human homolog to Drosophila gene CG8070 (SWISS-PROT Ref. No. Q9NVU7).

[0199] FIG. 129 shows the nucleic acid (SEQ ID NO:287) and amino acid (SEQ ID NO:288) sequence for the human homolog to Drosophila gene CG7460 (SWISS-PROT Ref. No. Q96QT3).

[0200] FIG. 130 shows the nucleic acid (SEQ ID NO:289) and amino acid (SEQ ID NO:290) sequence for the human homolog to Drosophila gene CG17735 (SWISS-PROT Ref. No. Q14669).

[0201] FIG. 131 shows the nucleic acid (SEQ ID NO:291) and amino acid (SEQ ID NO:292) sequence for the human homolog to Drosophila gene Gycalpha99B (SWISS-PROT Ref. No. P33402).

[0202] FIG. 132 shows the nucleic acid (SEQ ID NO:293) and amino acid (SEQ ID NO:294) sequence for the human homolog to Drosophila gene CG13893 (SWISS-PROT Ref. No. 076054).

[0203] FIG. 133 shows the nucleic acid (SEQ ID NO:295) and amino acid (SEQ ID NO:296) sequence for the human homolog to Drosophila gene CG18176 (SWISS-PROT Ref. No. AAH33918).

[0204] FIG. 134 shows the nucleic acid (SEQ ID NO:297) and amino acid (SEQ ID NO:298) sequence for the human homolog to Drosophila gene CG8858 (SWISS-PROT Ref. No. O15074).

[0205] FIG. 135 shows the nucleic acid sequences (SEQ ID NO:299 and SEQ ID NO:301, respectively) and amino acid sequences (SEQ ID NO:300 and SEQ ID NO:302, respectively) for the two human homologs to Drosophila gene Ac76E (SWISS-PROT Ref. No. Q08462 and SWISS-PROT Ref. No. P51828).

[0206] FIG. 136 shows the nucleic acid (SEQ ID NO:303) and amino acid (SEQ ID NO:304) sequence for the human homolog to Drosophila gene CG17010 (SWISS-PROT Ref. No. Q9H477).

[0207] FIG. 137 shows the nucleic acid sequences (SEQ ID NO:305, SEQ ID NO:307 and SEQ ID NO:309, respectively) and amino acid sequences (SEQ ID NO:306, SEQ ID NO:308 and SEQ ID NO:310, respectively) for the three human homologs to Drosophila gene Tkv (SWISS-PROT Ref. No. 000238, SWISS-PROT Ref. No. P36894 and SWISS-PROT Ref. No. Q04771).

[0208] FIG. 138 shows the nucleic acid (SEQ ID NO:311) and amino acid (SEQ ID NO:312) sequence for the human homolog to Drosophila gene Dnt (SWISS-PROT Ref. No. P34925).

[0209] FIG. 139 shows the nucleic acid sequences (SEQ ID NO:313 and SEQ ID NO:315, respectively) and amino acid sequences (SEQ ID NO:314 and SEQ ID NO:316, respectively) for the two human homologs to Drosophila gene ACXD (SWISS-PROT Ref. No. Q08462 and SWISS-PROT Ref. No. P40145).

[0210] FIG. 140 shows the nucleic acid (SEQ ID NO:317) and amino acid (SEQ ID NO:318) sequence for the human homolog to Drosophila gene Aats-ala-m (SWISS-PROT Ref. No. P49588).

[0211] FIG. 141 shows the nucleic acid (SEQ ID NO:319) and amino acid (SEQ ID NO:320) sequence for the human homolog to Drosophila gene Gek (SWISS-PROT Ref. No. Q9Y5S2).

[0212] FIG. 142 shows the nucleic acid sequences (SEQ ID NO:321 and SEQ ID NO:323, respectively) and amino acid sequence (SEQ ID NO:322 and SEQ ID NO:324, respectively) for the two human homologs to Drosophila gene CG3216 (SWISS-PROT Ref. No. P16066 and SWISS-PROT Ref. No. P20594).

[0213] FIG. 143 shows the nucleic acid (SEQ ID NO:325) and amino acid (SEQ ID NO:326) sequence for the human homolog to Drosophila gene CG5653 (SWISS-PROT Ref. No. Q96QT3).

[0214] FIG. 144 shows the nucleic acid (SEQ ID NO:327) and amino acid (SEQ ID NO:328) sequence for the human homolog to Drosophila gene CG17740 (SWISS-PROT Ref. No. Q9HCB6).

[0215] FIG. 145 shows the nucleic acid (SEQ ID NO:329) and amino acid (SEQ ID NO:330) sequence for the human homolog to Drosophila gene TepI (SWISS-PROT Ref. No. Q8TDJ3).

[0216] FIG. 146 shows the nucleic acid (SEQ ID NO:331) and amino acid (SEQ ID NO:332) sequence for the human homolog to Drosophila gene for (SWISS-PROT Ref. No. Q13976).

[0217] FIG. 147 shows the nucleic acid sequences (SEQ ID NO:333, and SEQ ID NO:335, respectively) and amino acid sequences (SEQ ID NO:334 and SEQ ID NO:336, respectively) for the two human homologs to Drosophila gene Ac13E (SWISS-PROT Ref. No. 060503 and SWISS-PROT Ref. No. 060266).

[0218] FIG. 148 shows the nucleic acid (SEQ ID NO:337) and amino acid (SEQ ID NO:338) sequence for the human homolog to Drosophila gene CG2667 (SWISS-PROT Ref. No. Q16760).

[0219] FIG. 149 shows the nucleic acid (SEQ ID NO:339) and amino acid (SEQ ID NO:340) sequence for the human homolog to Drosophila gene CG7842 (SWISS-PROT Ref. No. 095510).

[0220] FIG. 150 shows the nucleic acid (SEQ ID NO:341) and amino acid (SEQ ID NO:342) sequence for the human homolog to Drosophila gene CG17486 (SWISS-PROT Ref. No. Q9NWL6).

[0221] FIG. 151 shows the nucleic acid (SEQ ID NO:343) and amino acid (SEQ ID NO:344) sequence for the human homolog to Drosophila gene CG6969 (SWISS-PROT Ref. No. Q92626).

[0222] FIG. 152 shows the nucleic acid (SEQ ID NO:345) and amino acid (SEQ ID NO:346) sequence for the human homolog to Drosophila gene CG12262 (SWISS-PROT Ref. No. P11310).

[0223] FIG. 153 shows the nucleic acid (SEQ ID NO:347) and amino acid (SEQ ID NO:348) sequence for the human homolog to Drosophila gene Fray (SWISS-PROT Ref. No. 095747).

[0224] FIG. 154 shows the nucleic acid (SEQ ID NO:349) and amino acid (SEQ ID NO:350) sequence for the human homolog to Drosophila gene CG6879 (SWISS-PROT Ref. No. Q92626).

[0225] FIG. 155 shows the nucleic acid (SEQ ID NO:351) and amino acid (SEQ ID NO:352) sequence for the human homolog to Drosophila gene CG11594 (SWISS-PROT Ref. No. Q96C11).

[0226] FIG. 156 shows the nucleic acid (SEQ ID NO:353) and amino acid (SEQ ID NO:354) sequence for the human homolog to Drosophila gene S6kII (SWISS-PROT Ref. No. P51812).

[0227] FIG. 157 shows the nucleic acid sequences (SEQ ID NO:355 and SEQ ID NO:357, respectively) and amino acid sequences (SEQ ID NO:356 and SEQ ID NO:358, respectively) for the two human homologs to Drosophila gene CG11714 (SWISS-PROT Ref. No. Q9HAB2 and SWISS-PROT Ref. No. 043791).

[0228] FIG. 158 shows the nucleic acid (SEQ ID NO:359) and amino acid (SEQ ID NO:360) sequence for the human homolog to Drosophila gene CG3534 (SWISS-PROT Ref. No. 075191).

[0229] FIG. 159 shows the nucleic acid (SEQ ID NO:361) and amino acid (SEQ ID NO:362) sequence for the human homolog to Drosophila gene CG7335 (SWISS-PROT Ref. No. P50053).

[0230] FIG. 160 shows the nucleic acid sequences (SEQ ID NO:363 and SEQ ID NO:265, respectively) and amino acid sequences (SEQ ID NO:364 and SEQ ID NO:366, respectively) for the two human homologs to Drosophila gene CG11275 (SWISS-PROT Ref. No. Q9HAB2 and SWISS-PROT Ref. No. 043791).

[0231] FIG. 161 shows the nucleic acid (SEQ ID NO:367) and amino acid (SEQ ID NO:368) sequence for the human homolog to Drosophila gene CG16726 (SWISS-PROT Ref. No. P34981).

[0232] FIG. 162 shows the nucleic acid (SEQ ID NO:369) and amino acid (SEQ ID NO:370) sequence for the human homolog to Drosophila gene CG7514 (SWISS-PROT Ref. No. Q02978).

[0233] FIG. 163 shows the nucleic acid (SEQ ID NO:371) and amino acid (SEQ ID NO:372) sequence for the human homolog to Drosophila gene CG17283 (SWISS-PROT Ref. No. P14091).

[0234] FIG. 164 shows the nucleic acid (SEQ ID NO:373) and amino acid (SEQ ID NO:374) sequence for the human homolog to Drosophila gene BcDNA:GH07626 (SWISS-PROT Ref. No. Q16702).

[0235] FIG. 165 shows the nucleic acid (SEQ ID NO:375) and amino acid (SEQ ID NO:376) sequence for the human homolog to Drosophila gene CG16752 (SWISS-PROT Ref. No. Q8TDU8).

[0236] FIG. 166 shows the nucleic acid (SEQ ID NO:377) and amino acid (SEQ ID NO:378) sequence for the human homolog to Drosophila gene Rpt1 (SWISS-PROT Ref. No. P35998).

[0237] FIG. 167 shows the nucleic acid sequences (SEQ ID NO:379 and SEQ ID NO:381, respectively) and amino acid sequences (SEQ ID NO:380 and SEQ ID NO:382, respectively) for the two human homologs to Drosophila gene Wts (SWISS-PROT Ref. No. 095835 and SWISS-PROT Ref. No. Q9P2×1).

[0238] FIG. 168 shows the nucleic acid (SEQ ID NO:383) and amino acid (SEQ ID NO:384) sequence for the human homolog to Drosophila gene CG1582 (SWISS-PROT Ref. No. AAM73547).

[0239] FIG. 169 shows the nucleic acid (SEQ ID NO:385) and amino acid (SEQ ID NO:386) sequence for the human homolog to Drosophila gene CG12289 (SWISS-PROT Ref. No. P50053).

[0240] FIG. 170 shows the nucleic acid (SEQ ID NO:387) and amino acid (SEQ ID NO:388) sequence for the human homolog to Drosophila gene Pepck (SWISS-PROT Ref. No. Q16822).

[0241] FIG. 171 shows the nucleic acid (SEQ ID NO:389) and amino acid (SEQ ID NO:390) sequence for the human homolog to Drosophila gene CG5665 (SWISS-PROT Ref. No. PO₆₈₅₈).

[0242] FIG. 172 shows the nucleic acid (SEQ ID NO:391) and amino acid (SEQ ID NO:392) sequence for the human homolog to Drosophila gene CG7285 (SWISS-PROT Ref. No. Q96TF2).

[0243] FIG. 173 shows the nucleic acid (SEQ ID NO:393) and amino acid (SEQ ID NO:394) sequence for the human homolog to Drosophila gene Bt (SWISS-PROT Ref. No. Q8WZ42).

[0244] FIG. 174 shows the nucleic acid (SEQ ID NO:395) and amino acid (SEQ ID NO:396) sequence for the human homolog to Drosophila gene CG8795 (SWISS-PROT Ref. No. Q9GZQ4).

[0245] FIG. 175 shows the nucleic acid (SEQ ID NO:397) and amino acid (SEQ ID NO:398) sequence for the human homolog to Drosophila gene CGI0967 (SWISS-PROT Ref. No. O75385).

[0246] FIG. 176 shows the nucleic acid (SEQ ID NO:399) and amino acid (SEQ ID NO:400) sequence for the human homolog to Drosophila gene CG3809 (SWISS-PROT Ref. No. P55263).

[0247] FIG. 177 shows the nucleic acid (SEQ ID NO:401) and amino acid (SEQ ID NO:402) sequence for the human homolog to Drosophila gene Ack (SWISS-PROT Ref. No. Q07912).

[0248] FIG. 178 shows the nucleic acid (SEQ ID NO:403) and amino acid (SEQ ID NO:404) sequence for the human homo log to Drosophila gene Abl (SWISS-PROT Ref. No. P00519).

[0249] FIG. 179 shows the nucleic acid (SEQ ID NO:405) and amino acid (SEQ ID NO:406) sequence for the human homolog to Drosophila gene CG7362 (SWISS-PROT Ref. No. P14786).

[0250] FIG. 180 shows the nucleic acid (SEQ ID NO:407) and amino acid (SEQ ID NO:408) sequence for the human homolog to Drosophila gene Cyp9f2 (SWISS-PROT Ref. No. P08684).

[0251] FIG. 181 is a pair of graphs showing FACS profiles for D.Mel-2 cells.

[0252] FIG. 182 shows cells transfected with Ect2 siRNA COD1513 (aaGUGGGCUUUGUAAAGAUGG) result in a block in mitosis.

[0253] FIG. 183 shows preferred profile after adjustment of voltages on FSC and SSC channels.

[0254] FIG. 184 shows the profile after the voltage on FL3 channel is also altered to enable analysis of cells in G1, S and G2/M, setting a gate (G2) to exclude doublets resulting from cell clumping.

[0255] FIG. 185 is a histogram showing counts against FL3-H within the gated region (G2) and the associated histogram statistics is generated. Using the histogram statistics, events in G1, in S and in G2/M are calculated, where the number of G1 events was equal to M2×2, the number of G2/M events is equal to M3×2 and the number of S events equated to M1-[(M2×2)+(M3×2)].

[0256] FIG. 185 is a histogram showing counts against FL3-H within the gated region (G2) and the associated histogram statistics is generated. Using the histogram statistics, events in G1, in S and in G2/M are calculated, where the number of G1 events was equal to M2×2, the number of G2/M events is equal to M3×2 and the number of S events equated to M1−[(M2×2)+(M3×2)].

### DETAILED DESCRIPTION OF THE INVENTION

[0257] The invention describes human genes involved in cell cycle progression. Such genes can be used in assays described herein to determine if a candidate substance is an inhibitor of cell cycle progression. These same assays can be used to determine if the substance is an enhancer of cell cycle progression.

[0258] Such assays include binding asays, where the degree of binding of the substance to the polypeptides described herein is determined. Such assays also include determining if the substance prevents the binding between a polypeptide described herein and another substance known to bind that polypeptide.

[0259] The assays also include assays to determine the presence or absence of a polypeptide described herein in a sample, by adding to the sample a substance known to bind that polypeptide, and determining if binding takes place. Alternatively, a nucleic acid probe, the sequence of which is based on the nucleic acid that encodes the polypeptide, can be used to determine the presence or absence in the sample of the nucleic acid encoding the polypeptide. The probe can be added to the sample and incubated under hybridizing conditions to cause binding to the nucleic acid, if it is present in the sample. Such a probe can be labelled to more easily determine if binding has occurred. Alternatively, instead of a nucleic acid probe, an antibody specific for either the nucleic acid of the polypeptide can be used.

[0260] In situations where one wishes to know if a mutation has occurred in a nucleic acid encoding a polypeptide described herein, one can obtain a sample containing the nucleic acid, and use a nucleic acid probe specific for the region in which the mutation is believed to occur. Lack of binding, relative to a sample containing the equivalent nucleic acid without the mutation, indicates that the nucleic acid contains a mutation at that location. If it is not known where in the nucleic acid the mutation has occurred, then a sequential series of probes can be used which cover the entire length of the nucleic acid.

[0261] These assays can also be used to determine if a polypeptide described herein is being overexpressed in a tissue, e.g., a tumor, or tissue suspected of harboring overproliferating cells. An amount of a known ligand can be added to a sample from the tissue, where the ligand binds the polypeptide. If the amount of bound ligand-polypeptide complex in the sample is greater than that found normally, then the polypeptide is overexpressed. “Normally” can mean the amount of polypeptide found in a sample of another tissue from the same organism, or the equivalent tissue from another organism, or relative to previously-determined baseline levels of expression.

[0262] Any of the assays described above can be incorporated into a kit for determining presence/absence of a nucleic acid or polypeptide described herein, or the level of expression of a polypeptide described herein.

[0263] The practice of the present invention will employ, unless otherwise indicated, conventional techniques of chemistry, molecular biology, microbiology, recombinant DNA and immunology, which are within the capabilities of a person of ordinary skill in the art. Such techniques are explained in the literature. See, for example, J. Sambrook, E. F. Fritsch, and T. Maniatis, 1989, Molecular Cloning: A Laboratory Manual, Second Edition, Books 1-3, Cold Spring Harbor Laboratory Press; Ausubel, F. M. et al. (1995 and periodic supplements; Current Protocols in Molecular Biology, ch. 9, 13, and 16, John Wiley & Sons, New York, N.Y.); B. Roe, J. Crabtree, and A. Kahn, 1996, DNA Isolation and Sequencing: Essential Techniques, John Wiley & Sons; J. M. Polak and James O'D. McGee, 1990, In Situ Hybridization: Principles and Practice; Oxford University Press; M. J. Gait (Editor), 1984, Oligonucleotide Synthesis: A Practical Approach, IRL Press; and, D. M. J. Lilley and J. E. Dahlberg, 1992, Methods of Enzymology: DNA Structure Part A: Synthesis and Physical Analysis of DNA Methods in Enzymology, Academic Press. Each of these general texts is herein incorporated by reference.

[0264] By “modulating cell cycle progression” is meant that for when a given cell is treated, its normal tendency to progress through the cell cycle is changed, either increased or decreased, compared to an untreated cell, where otherwise the environmental conditions are the same.

[0265] Mitosis can be measured by FACS analysis, microscopy or by assays based on the status of cell cycle proteins. Standard assays include, but are not limited to, those protocols used in the molecular biological arts to assess cell cycle arrest, cell cycle analysis, cell proliferation of various cell types, detection of apoptosis, e.g., by apoptotic cell morphology or Annexin V-FITC assay, and inhibition of cancer cell growth or tumor growth in various animal models. Such assays are well-known to those of ordinary skill in those fields. Examples of assays are described herein.

[0266] The “functional activity” of a protein in the context of the present invention describes the function the protein performs in its native environment. Altering the functional activity of a protein includes within its scope increasing, decreasing or otherwise altering the native activity of the protein itself. In addition, it also includes within its scope increasing or decreasing the level of expression and/or altering the intracellular distribution of the nucleic acid encoding the protein, and/or altering the intracellular distribution of the protein itself.

[0267] The term “expression” refers to the transcription of a gene's DNA template to produce the corresponding mRNA and translation of this mRNA to produce the corresponding gene product (i.e., a peptide, polypeptide, or protein).

[0268] By “polynucleotide” or “polypeptide” is meant the DNA and protein sequences disclosed herein. The terms also include close variants of those sequences, where the variant possesses the same biological activity as the reference sequence. Such variant sequences include “alleles” (variant sequences found at the same genetic locus in the same or closely-related species), “homologs” (a gene related to a second gene by descent from a common ancestral DNA sequence, and separated by either speciation (“ortholog”) or genetic duplication (“paralog”)), so long as such variants retain the same biological activity as the reference sequence(s) disclosed herein.

[0269] The invention is also intended to include silent polymorphisms and conservative substitutions in the polynucleotides and polypeptides disclosed herein, so long as such variants retain the same biological activity as the reference sequence(s) as disclosed herein.

Polypeptides

[0270] It will be understood that polypeptides identified herein are not limited to polypeptides identified in Table 1 or those polypeptides having the amino acid sequence encoded by the nucleic acid sequences identified in Table 1 or fragments thereof but also include homologous sequences obtained from any source, for example related viral/bacterial proteins, cellular homologues and synthetic peptides, as well as variants or derivatives thereof.

[0271] Thus, reference herein to “polypeptides” also includes those sequences encoding homologues from other species including animals such as mammals (e.g., mice, rats or rabbits), especially primates. Particularly preferred polypeptides include homologous human sequences.

[0272] The term also covers variants, homologues or derivatives of the amino acid sequences encoded by the nucleic acids identified in Table 1, as well as variants, homologues or derivatives of the nucleotide sequences coding for the amino acid sequences.

[0273] In the context of the present invention, a homologous sequence is taken to include an amino acid sequence which is at least 15, 20, 25, 30, 40, 50, 60, 70, 80 or 90% identical, preferably at least 95 or 98% identical at the amino acid level over at least 50 or 100, preferably 200, 300, 400 or 500 amino acids with any one of the polypeptide sequences disclosed herein. In particular, homology should typically be considered with respect to those regions of the sequence known to be essential for protein function rather than non-essential neighbouring sequences. This is especially important when considering homologous sequences from distantly related organisms.

[0274] Although homology can also be considered in terms of functional similarity (i.e., amino acid residues having similar chemical properties/functions), in the context of the present invention it is preferred to express homology in terms of sequence identity.

[0275] Homology comparisons can be conducted by eye, or more usually, with the aid of readily available sequence comparison programs. These publicly and commercially available computer programs can calculate percent homology between two or more sequences.

[0276] Percent homology may be calculated over contiguous sequences, i.e., one sequence is aligned with the other sequence and each amino acid in one sequence directly compared with the corresponding amino acid in the other sequence, one residue at a time. This is called an “ungapped” alignment. Typically, such ungapped alignments are performed only over a relatively short number of residues (for example less than 50 contiguous amino acids).

[0277] Although this is a very simple and consistent method, it fails to take into consideration that, for example, in an otherwise identical pair of sequences, one insertion or deletion will cause the following amino acid residues to be put out of alignment, thus potentially resulting in a large reduction in percent homology when a global alignment is performed. Consequently, most sequence comparison methods are designed to produce optimal alignments that take into consideration possible insertions and deletions without penalising unduly the overall homology score. This is achieved by inserting “gaps” in the sequence alignment to try to maximise local homology.

[0278] However, these more complex methods assign “gap penalties” to each gap that occurs in the alignment so that, for the same number of identical amino acids, a sequence alignment with as few gaps as possible—reflecting higher relatedness between the two compared sequences—will achieve a higher score than one with many gaps. “Affine gap costs” are typically used that charge a relatively high cost for the existence of a gap and a smaller penalty for each subsequent residue in the gap. This is the most commonly used gap scoring system. High gap penalties will of course produce optimised alignments with fewer gaps. Most alignment programs allow the gap penalties to be modified. However, it is preferred to use the default values when using such software for sequence comparisons. For example when using the GCG Wisconsin Bestfit package (see below) the default gap penalty for amino acid sequences is −12 for a gap and −4 for each extension.

[0279] Calculation of maximum percent homology therefore firstly requires the production of an optimal alignment, taking into consideration gap penalties. A suitable computer program for carrying out such an alignment is the GCG Wisconsin Bestfit package (University of Wisconsin, U.S.A; Devereux et al., 1984, Nucleic Acids Research 12:387). Examples of other software than can perform sequence comparisons include, but are not limited to, the BLAST package (see Ausubel et al., 1999 ibid—Chapter 18), FASTA (Altschul et al., 1990, J. Mol. Biol. 215:403-410) and the GENEWORKS suite of comparison tools. Both BLAST and FASTA are available for offline and online searching (see Ausubel et al., 1999 ibid, pages 7-58 to 7-60). However it is preferred to use the GCG Bestfit program.

[0280] Although the final percent homology can be measured in terms of identity, the alignment process itself is typically not based on an all-or -nothing pair comparison. Instead, a scaled similarity score matrix is generally used that assigns scores to each pairwise comparison based on chemical similarity or evolutionary distance. An example of such a matrix commonly used is the BLOSUM62 matrix—the default matrix for the BLAST suite of programs. GCG Wisconsin programs generally use either the public default values or a custom symbol comparison table if supplied (see user manual for further details). It is preferred to use the public default values for the GCG package, or in the case of other software, the default matrix, such as BLOSUM62.

[0281] Once the software has produced an optimal alignment, it is possible to calculate percent homology, preferably percent sequence identity. The software typically does this as part of the sequence comparison and generates a numerical result.

[0282] The terms “variant” or “derivative” in relation to amino acid sequences includes any substitution of, variation of, modification of, replacement of, deletion of or addition of one (or more) amino acids from or to the sequence providing the resultant amino acid sequence retains substantially the same activity as the unmodified sequence, preferably having at least the same activity as the polypeptides identified in Table 1 or the polypeptides encoded by the nucleic acid sequences identified in Table 1.

[0283] Polypeptides having the amino acid sequence encoded by the nucleic acid sequences identified in Table 1, or fragments or homologues thereof may be modified for use in the present invention. Typically, modifications are made that maintain the biological activity of the sequence. Amino acid substitutions may be made, for example from 1, 2 or 3 to 10, 20 or 30 substitutions provided that the modified sequence retains the biological activity of the unmodified sequence. Alternatively, modifications may be made to deliberately inactivate one or more functional domains of the polypeptides of the invention. Amino acid substitutions may include the use of non-naturally occurring analogues, for example to increase blood plasma half-life of a therapeutically administered polypeptide.

[0284] Conservative substitutions may be made, for example according to the Table below. Amino acids in the same block in the second column and preferably in the same line in the third column may be substituted for each other:

| | | |
|---|---|---|
| ALIPHATIC | Non-polar | G A P |
| | | I L V |
| | Polar - uncharged | C S T M |
| | | N Q |
| | Polar - charged | D E |
| | | K R |
| AROMATIC | | H F W Y |

[0285] Polypeptides for use in the invention also include fragments of the full length sequences mentioned above. Preferably said fragments comprise at least one epitope. Methods of identifying epitopes are well known in the art. Fragments will typically comprise at least 6 amino acids, more preferably at least 10, 20, 30, 50 or 100 amino acids. Proteins are typically made by recombinant means, for example as described below. However they may also be made by synthetic means using techniques well known to skilled persons such as solid phase synthesis. Proteins may also be produced as fusion proteins, for example to aid in extraction and purification. Examples of fusion protein partners include glutathione-S-transferase (GST), 6×His, GAL4 (DNA binding and/or transcriptional activation domains) and β-galactosidase. It may also be convenient to include a proteolytic cleavage site between the fusion protein partner and the protein sequence of interest to allow removal of fusion protein sequences. Preferably the fusion protein will not hinder the function of the protein of interest sequence. Proteins may also be obtained by purification of cell extracts from animal cells.

[0286] Multimeric proteins comprising the cell cycle progression proteins are also intended to be encompassed by the present invention. By “multimer” is meant a protein comprising two or more copies of a subunit protein. The subunit protein may be one of the proteins of the present invention, e.g., a cell cycle progression protein as disclosed herein repeated two or more times. Such a multimer may also be a fusion or chimeric protein, e.g., a repeated cell cycle progression protein may be combined with polylinker sequence, and/or one or more cell cycle progression peptides, which may be present in a single copy, or may also be tandemly repeated, e.g., a protein may comprise two or more multimers within the overall protein.

[0287] Proteins may be in a substantially isolated form. It will be understood that the protein may be mixed with carriers or diluents which will not interfere with the intended purpose of the protein and still be regarded as substantially isolated. A protein for use in the invention may also be in a substantially purified form, in which case it will generally comprise the protein in a preparation in which more than 90%, e.g., 95%, 98% or 99% of the protein in the preparation is a protein as identified herein.

[0288] A polypeptide may be labeled with a revealing label. The revealing label may be any suitable label which allows the polypeptide to be detected. Suitable labels include radioisotopes, e.g., ¹²⁵I, enzymes, antibodies, polynucleotides and linkers such as biotin. Labeled polypeptides of the invention may be used in diagnostic procedures such as immunoassays to determine the amount of a polypeptide of the invention in a sample. Polypeptides or labeled polypeptides of the invention may also be used in serological or cell-mediated immune assays for the detection of immune reactivity to said polypeptides in animals and humans using standard protocols.

[0289] A polypeptide or labeled polypeptide or fragment thereof may also be fixed to a solid phase, for example the surface of a microarray, an immunoassay well or dipstick. Such labeled and/or immobilised polypeptides may be packaged into kits in a suitable container along with suitable reagents, controls, instructions and the like. Such polypeptides and kits may be used in methods of detection of antibodies to the polypeptides or their allelic or species variants by immunoassay.

[0290] Immunoassay methods are well known in the art and will generally comprise: (a) providing a polypeptide comprising an epitope bindable by an antibody against said protein; (b) incubating a biological sample with said polypeptide under conditions which allow for the formation of an antibody-antigen complex; and (c) determining whether antibody-antigen complex comprising said polypeptide is formed.

[0291] Immunoassays may be used for detecting polypeptides for examples in detecting a modulation of protein expression or function.

[0292] Polypeptides identified herein may be used in in vitro or in vivo cell culture systems to study the role of their corresponding genes and homologues thereof in cell function, including their function in disease. For example, truncated or modified polypeptides may be introduced into a cell to disrupt the normal functions which occur in the cell. The polypeptides of the invention may be introduced into the cell by in situ expression of the polypeptide from a recombinant expression vector (see below). The expression vector optionally carries an inducible promoter to control the expression of the polypeptide.

[0293] The use of appropriate host cells, such as insect cells or mammalian cells, is expected to provide for such post-translational modifications (e.g., myristolation, glycosylation, truncation, lapidation and tyrosine, serine or threonine phosphorylation) as may be needed to confer optimal biological activity on recombinant expression products of the invention. Such cell culture systems in which polypeptides of the invention are expressed may be used in assay systems to identify candidate substances which interfere with or enhance the functions of the polypeptides of the invention in the cell.

Polynucleotides

[0294] We demonstrate here that knockdown of genes as disclosed in the Examples causes a cell cycle defect, and that accordingly these genes and the proteins encoded by them are responsible for cell cycle function.

[0295] Polynucleotides or nucleic acids of the invention include polynucleotides identified in Table 1 or any one or more of the nucleic acid sequences encoding the polypeptides which are encoded by the nucleic acids identified in Table 1 and fragments thereof. Fragments will typically comprise at least 15 consecutive nucleotides of the full-length polynucleotide, more preferably at least 20, 30, 50 or 100 consecutive nucleotides of the full-length polynucleotide. It is straightforward to identify a nucleic acid sequence which encodes such a polypeptide, by reference to the genetic code. Furthermore, computer programs are available which translate a nucleic acid sequence to a polypeptide sequence, and/or vice versa. The disclosure of a nucleic acid and its corresponding polypeptide sequence includes a disclosure of all nucleic acids (and their sequences) which encode that polypeptide sequence.

[0296] It will be understood by a skilled person that numerous different polynucleotides can encode the same polypeptide as a result of the degeneracy of the genetic code. In addition, it is to be understood that skilled persons may, using routine techniques, make nucleotide substitutions that do not affect the polypeptide sequence encoded by the polynucleotides of the invention to reflect the codon usage of any particular host organism in which the polypeptides of the invention are to be expressed.

[0297] In preferred embodiments of the invention, nucleic acids of the invention comprise those polynucleotides, such as cDNA, mRNA, and genomic DNA. Such polynucleotides may typically comprise Drosophila cDNA, mRNA, and genomic DNA, Homo sapiens cDNA, mRNA, and genomic DNA, etc. Accession numbers are provided in the Examples for the nucleic acid sequences, and the polypeptides they encode can be derived by use of such accession numbers in a relevant database, such as a Drosophila sequence database, a human sequence database, including a Human Genome Sequence database, GadFly, FlyBase, etc. in particular, the annotated Drosophila sequence database of the Berkeley Drosophila Genome Project (GadFly: Genome Annotation Database of Drosophila at the world wide web site “fruitfly.org”, in the directory “/annot/”) may be used to identify such Drosophila and human polynucleotide or polypeptide sequences. Relevant sequences may also be obtained by searching sequence databases such as BLAST with the polypeptide sequences. In particular, a search using TBLASTN may be employed.

[0298] Nucleic acids for use in the invention may comprise DNA or RNA. They may be single-stranded or double-stranded. They may also be polynucleotides which include within them synthetic or modified nucleotides. A number of different types of modification to oligonucleotides are known in the art. These include methylphosphonate and phosphorothioate backbones, addition of acridine or polylysine chains at the 3′ and/or 5′ ends of the molecule. For the purposes of the present invention, it is to be understood that the polynucleotides described herein may be modified by any method available in the art. Such modifications may be carried out in order to enhance the in vivo activity or life span of polynucleotides of the invention.

[0299] The terms “variant”, “homologue” or “derivative” in relation to the nucleotide sequence for use in the present invention include any substitution of, variation of, modification of, replacement of, deletion of or addition of one (or more) nucleic acid from or to the sequence. Preferably said variant, homologues or derivatives code for a polypeptide having biological activity.

[0300] As indicated above, with respect to sequence homology, preferably there is at least 50 or 75%, more preferably at least 85%, more preferably at least 90% homology to the sequences shown in the sequence listing herein. More preferably there is at least 95%, more preferably at least 98%, homology. Nucleotide homology comparisons may be conducted as described above. A preferred sequence comparison program is the GCG Wisconsin Bestfit program described above. The default scoring matrix has a match value of 10 for each identical nucleotide and −9 for each mismatch. The default gap creation penalty is −50 and the default gap extension penalty is −3 for each nucleotide.

[0301] The present invention also encompasses the use of nucleotide sequences that are capable of hybridising selectively to the sequences presented herein, or any variant, fragment or derivative thereof, or to the complement of any of the above. Nucleotide sequences are preferably at least 15 nucleotides in length, more preferably at least 20, 30, 40 or 50 nucleotides in length.

[0302] The term “hybridization” as used herein shall include “the process by which a strand of nucleic acid joins with a complementary strand through base pairing” as well as the process of amplification as carried out in polymerase chain reaction technologies.

[0303] Polynucleotides capable of selectively hybridising to the nucleotide sequences presented herein, or to their complement, will be generally at least 70%, preferably at least 80 or 90% and more preferably at least 95% or 98% homologous to the corresponding nucleotide sequences presented herein over a region of at least 20, preferably at least 25 or 30, for instance at least 40, 60 or 100 or more contiguous nucleotides.

[0304] The term “selectively hybridizable” means that a nucleic acid is found to hybridize to the nucleic acid having a sequence identified in Table 1 at a level significantly above background. Background implies a level of signal generated by interaction between the test nucleic acid and a non-specific DNA member in a sample which is less than 10 fold, preferably less than 100 fold as intense as the specific interaction observed with the target DNA. The intensity of interaction may be measured, for example, by radiolabelling the probe, e.g., with ³²P.

[0305] Hybridization conditions are based on the melting temperature (Tm) of the nucleic acid binding complex, as taught in Berger and Kimmel (1987, Guide to Molecular Cloning Techniques, Methods in Enzymology, Vol 152, Academic Press, San Diego Calif.), and confer a defined “stringency” as explained below. Conditions for stringency are also described in U.S. Pat. No. 5,976,838, the teachings of which are incorporated herein by reference in its entirety. In particular, examples of highly stringent, stringent, reduced and least stringent conditions are provided in U.S. Pat. No. 5,976,838, in the Table on page 15. Examples of stringency conditions for solutions during and after hybridization are shown, and highly stringent conditions are those that are at least as stringent as, for example, conditions A-F; stringent conditions are at least as stringent as, for example, conditions G-L; and reduced stringency conditions are at least as stringent as, for example, conditions M-R of that table.

[0306] Maximum stringency typically occurs at about Tm-5° C. (5° C. below the Tm of the probe); high stringency at about 5° C. to 10° C. below Tm; intermediate stringency at about 10° C. to 20° C. below Tm; and low stringency at about 20° C. to 25° C. below Tm. As will be understood by those of skill in the art, a maximum stringency hybridization can be used to identify or detect identical polynucleotide sequences while an intermediate (or low) stringency hybridization can be used to identify or detect similar or related polynucleotide sequences.

[0307] Stringency conditions for hybridization refers to conditions of temperature and buffer composition which permit hybridization of a first nucleic acid sequence to a second nucleic acid sequence, wherein the conditions determine the degree of identity between those sequences which hybridize to each other. Therefore, “high stringency conditions” are those conditions wherein only nucleic acid sequences which are very similar to each other will hybridize. The sequences may be less similar to each other if they hybridize under moderate stringency conditions. Still less similarity is needed for two sequences to hybridize under low stringency conditions. By varying the hybridization conditions from a stringency level at which no hybridization occurs, to a level at which hybridization is first observed, conditions can be determined at which a given sequence will hybridize to those sequences that are most similar to it. The precise conditions determining the stringency of a particular hybridization include not only the ionic strength, temperature, and the concentration of destabilizing agents such as formamide, but also on factors such as the length of the nucleic acid sequences, their base composition, the percent of mismatched base pairs between the two sequences, and the frequency of occurrence of subsets of the sequences (e.g., small stretches of repeats) within other non-identical sequences. Washing is the step in which conditions are set so as to determine a minimum level of similarity between the sequences hybridizing with each other. Generally, from the lowest temperature at which only homologous hybridization occurs, a 1% mismatch between two sequences results in a 1° C. decrease in the melting temperature (Tₘ) for any chosen SSC concentration. Generally, a doubling of the concentration of SSC results in an increase in the Tₘ of about 17° C. Using these guidelines, the washing temperature can be determined empirically, depending on the level of mismatch sought. Hybridization and wash conditions are explained in Current Protocols in Molecular Biology (Ausubel, F. M. et al., eds., John Wiley & Sons, Inc., 1995, with supplemental updates) on pages 2.10.1 to 2.10.16, and 6.3.1 to 6.3.6.

[0308] High stringency conditions can employ hybridization at either (1) 1×SSC (10×SSC=3 M NaCl, 0.3 M Na₃-citrate.2H₂O (88 g/liter), pH to 7.0 with 1 M HCl), 1% SDS (sodium dodecyl sulfate), 0.1-2 mg/ml denatured salmon sperm DNA at 65° C., (2) 1×SSC, 50% formamide, 1% SDS, 0.1-2 mg/ml denatured salmon sperm DNA at 42° C., (3) 1% bovine serum albumen (fraction V), 1 mM Na₂.EDTA, 0.5 M NaHPO₄ (pH 7.2) (1 M NaHPO₄=134 g Na₂HPO₄.7H₂O, 4 ml 85% H₃PO₄ per liter), 7% SDS, 0.1-2 mg/ml denatured salmon sperm DNA at 65° C., (4) 50% formamide, 5×SSC, 0.02 M Tris-HCl (pH 7.6), 1× Denhardt's solution (100X=10 g Ficoll 400, 10 g polyvinylpyrrolidone, 10 g bovine serum albumin (fraction V), water to 500 ml), 10% dextran sulfate, 1% SDS, 0.1-2 mg/ml denatured salmon sperm DNA at 42° C., (5) 5×SSC, 5× Denhardt's solution, 1% SDS, 100:g/ml denatured salmon sperm DNA at 65° C., or (6) 5×SSC, 5× Denhardt's solution, 50% formamide, 1% SDS, 100:g/ml denatured salmon sperm DNA at 42° C., with high stringency washes of either (1) 0.3-0.1×SSC, 0.1% SDS at 65° C., or (2) 1 mM Na₂EDTA, 40 mM NaHPO₄ (pH 7.2), 1% SDS at 65° C. The above conditions are intended to be used for DNA-DNA hybrids of 50 base pairs or longer. Where the hybrid is believed to be less than 18 base pairs in length, the hybridization and wash temperatures should be 5-101C below that of the calculated Tm of the hybrid, where Tₘ in ° C.=(2× the number of A and T bases)+(4× the number of G and C bases). For hybrids believed to be about 18 to about 49 base pairs in length, the Tₘ in ° C.=(81.5° C.+16.6(log₁₀M)+0.41(% G+C)−0.61 (% formamide)−500/L), where “M” is the molarity of monovalent cations (e.g., Na⁺), and “L” is the length of the hybrid in base pairs.

[0309] Moderate stringency conditions can employ hybridization at either (1) 4×SSC, (10×SSC=3 M NaCl, 0.3 M Na₃-citrate.2H₂O (88 g/liter), pH to 7.0 with 1 M HCl), 1% SDS (sodium dodecyl sulfate), 0.1-2 mg/ml denatured salmon sperm DNA at 65° C., (2) 4×SSC, 50% formamide, 1% SDS, 0.1-2 mg/ml denatured salmon sperm DNA at 42° C., (3) 1% bovine serum albumen (fraction V), 1 mM Na₂EDTA, 0.5 M NaHPO₄ (pH 7.2) (1 M NaHPO₄=134 g Na₂HPO₄.7H₂O, 4 ml 85% H₃PO₄ per liter), 7% SDS, 0.1-2 mg/ml denatured salmon sperm DNA at 65° C., (4) 50% formamide, 5×SSC, 0.02 M Tris-HCl (pH 7.6), 1× Denhardt's solution (100×=10 g Ficoll 400, 10 g polyvinylpyrrolidone, 10 g bovine serum albumin (fraction V), water to 500 ml), 10% dextran sulfate, 1% SDS, 0.1-2 mg/ml denatured salmon sperm DNA at 42° C., (5) 5×SSC, 5× Denhardt's solution, 1% SDS, 1000g/ml denatured salmon sperm DNA at 65° C., or (6) 5×SSC, 5× Denhardt's solution, 50% formamide, 1% SDS, 100:g/ml denatured salmon sperm DNA at 42° C., with moderate stringency washes of 1×SSC, 0.1% SDS at 65° C. The above conditions are intended to be used for DNA-DNA hybrids of 50 base pairs or longer. Where the hybrid is believed to be less than 18 base pairs in length, the hybridization and wash temperatures should be 5-110° C. below that of the calculated Tₘ of the hybrid, where Tₘ in ° C.=(2× the number of A and T bases)+(4× the number of G and C bases). For hybrids believed to be about 18 to about 49 base pairs in length, the Tₘ in ° C.=(81.5° C.+16.6(log₁₀M)+0.41(% G+C)−0.61 (% formamide)−500/L), where “M” is the molarity of monovalent cations (e.g., Na⁺), and “L” is the length of the hybrid in base pairs.

[0310] Low stringency conditions can employ hybridization at either (1) 4×SSC, (10×SSC=3 M NaCl, 0.3 M Na₃-citrate.2H₂O (88 g/liter), pH to 7.0 with 1 M HCl), 1% SDS (sodium dodecyl sulfate), 0.1-2 mg/ml denatured salmon sperm DNA at 50° C., (2) 6×SSC, 50% formamide, 1% SDS, 0.1-2 mg/ml denatured salmon sperm DNA at 40° C., (3) 1% bovine serum albumen (fraction V), 1 mM Na₂EDTA, 0.5 M NaHPO₄ (pH 7.2) (1 M NaHPO₄=134 g Na₂HPO₄.7H₂O, 4 ml 85% H₃PO₄ per liter), 7% SDS, 0.1-2 mg/ml denatured salmon sperm DNA at 50° C., (4) 50% formamide, 5×SSC, 0.02 M Tris-HCl (pH 7.6), 1× Denhardt's solution (100×=10 g Ficoll 400, 10 g polyvinylpyrrolidone, 10 g bovine serum albumin (fraction V), water to 500 ml), 10% dextran sulfate, 1% SDS, 0.1-2 mg/ml denatured salmon sperm DNA at 40° C., (5) 5×SSC, 5× Denhardt's solution, 1% SDS, 100:g/ml denatured salmon sperm DNA at 50° C., or (6) 5×SSC, 5× Denhardt's solution, 50% formamide, 1% SDS, 100:g/ml denatured salmon sperm DNA at 40° C., with low stringency washes of either 2×SSC, 0.1% SDS at 50° C., or (2) 0.5% bovine serum albumin (fraction V), 1 mM Na₂EDTA, 40 mM NaHPO₄ (pH 7.2), 5% SDS. The above conditions are intended to be used for DNA-DNA hybrids of 50 base pairs or longer. Where the hybrid is believed to be less than 18 base pairs in length, the hybridization and wash temperatures should be 5-10° C. below that of the calculated Tₘ of the hybrid, where Tₘ in ° C.=(2× the number of A and T bases)+(4× the number of G and C bases). For hybrids believed to be about 18 to about 49 base pairs in length, the Tₘ in ° C.=(81.5° C.+16.6(log₁₀M)+0.41(% G+C)−0.61 (% formamide)−500/L), where “M” is the molarity of monovalent cations (e.g., Na⁺), and “L” is the length of the hybrid in base pairs.

[0311] In a preferred aspect, the present invention covers the use of nucleotide sequences that can hybridise to the nucleotide sequence of the present invention under stringent conditions (e.g., 65° C. and 0.1×SSC (1×SSC=0.15 M NaCl, 0.015 M Na₃ Citrate pH 7.0)).

[0312] Where the polynucleotide is double-stranded, both strands of the duplex, the use of either individually or in combination, is encompassed by the present invention. Where the polynucleotide is single-stranded, it is to be understood that the use of the complementary sequence of that polynucleotide is also included within the scope of the present invention.

[0313] Polynucleotides which are not 100% homologous to the sequences in Table 1 but the use of which falls within the scope of the invention can be obtained in a number of ways. Other variants of the sequences described herein may be obtained for example by probing DNA libraries made from a range of individuals, for example individuals from different populations. In addition, other viral/bacterial, or cellular homologues particularly cellular homologues found in mammalian cells (e.g., rat, mouse, bovine and primate cells), may be obtained and such homologues and fragments thereof in general will be capable of selectively hybridising to sequences identified in Table 1. Such sequences may be obtained by probing cDNA libraries made from or genomic DNA libraries from other animal species, and probing such libraries with probes comprising all or part of any on of the sequences under conditions of medium to high stringency. The nucleotide sequences of or which encode the human homologues identified in column 3 of Table 1, may preferably be used to identify other primate/mammalian homologues or allelic variants.

[0314] Variants and strain/species homologues may also be obtained using degenerate PCR which will use primers designed to target sequences within the variants and homologues of the sequences of Table 1. Conserved sequences can be predicted, for example, by aligning the amino acid sequences from several variants/homologues. Sequence alignments can be performed using computer software known in the art. For example the GCG Wisconsin PileUp program is widely used.

[0315] The primers used in degenerate PCR will contain one or more degenerate positions and will be used at stringency conditions lower than those used for cloning sequences with single sequence primers against known sequences. It will be appreciated by the skilled person that overall nucleotide homology between sequences from distantly related organisms is likely to be very low and thus in these situations degenerate PCR may be the method of choice rather than screening libraries with labeled fragments.

[0316] In addition, homologous sequences may be identified by searching nucleotide and/or protein databases using search algorithms such as the BLAST suite of programs. This approach is described below and in the Examples.

[0317] Alternatively, such polynucleotides may be obtained by site directed mutagenesis of characterised sequences. This may be useful where for example silent codon changes are required to sequences to optimise codon preferences for a particular host cell in which the polynucleotide sequences are being expressed. Other sequence changes may be desired in order to introduce restriction enzyme recognition sites, or to alter the property or function of the polypeptides encoded by the polynucleotides. For example, further changes may be desirable to represent particular coding changes found in nucleic acid sequences which give rise to mutant genes which have lost their regulatory function. Probes based on such changes can be used as diagnostic probes to detect such mutants.

[0318] Polynucleotides may be used to produce a primer, e.g., a PCR primer, a primer for an alternative amplification reaction, a probe, e.g., labeled with a revealing label by conventional means using radioactive or non-radioactive labels, or the polynucleotides may be cloned into vectors. Such primers, probes and other fragments will be at least 8, 9, 10, or 15, preferably at least 20, for example at least 25, 30 or 40 nucleotides in length, and are also encompassed by the term polynucleotides as used herein.

[0319] Polynucleotides such as a DNA polynucleotides and probes for use in the invention may be produced recombinantly, synthetically, or by any means available to those of skill in the art. They may also be cloned by standard techniques. The invention also encompasses a composition comprising one or more isolated polynucleotides encoding a cell cycle progression protein, e.g., a vector containing a polynucleotide encoding a cell cycle progression protein, and also host cells containing such a vector. By “host cell” is meant a cell which has been or can be used as the recipient of transferred nucleic acid by means of a vector. Host cells can prokaryotic or eukaryotic, mammalian, plant, or insect, and can exist as single cells, or as a collection, e.g., as a culture, or in a tissue culture, or in a tissue or an organism. Host cells can also be derived from normal or diseased tissue from a multicellular organism, e.g., a mammal. Host cell, as used herein, is intended to include not only the original cell which was transformed with a nucleic acid, but also descendants of such a cell, which still contain the nucleic acid. The exogenous polynucleotide may be maintained as a non-integrated vector, for example, a plasmid, or alternatively, may be integrated into the host genome. The vector can also contain regulatory sequences, e.g., sequences permitting expression of the polynucleotide.

[0320] In general, primers will be produced by synthetic means, involving a stepwise manufacture of the desired nucleic acid sequence one nucleotide at a time. Techniques for accomplishing this using automated techniques are readily available in the art.

[0321] Longer polynucleotides will generally be produced using recombinant means, for example using a PCR (polymerase chain reaction) cloning techniques. This will involve making a pair of primers (e.g., of about 15 to 30 nucleotides) flanking a region of the lipid targeting sequence which it is desired to clone, bringing the primers into contact with mRNA or cDNA obtained from an animal or human cell, performing a polymerase chain reaction under conditions which bring about amplification of the desired region, isolating the amplified fragment (e.g., by purifying the reaction mixture on an agarose gel) and recovering the amplified DNA. The primers may be designed to contain suitable restriction enzyme recognition sites so that the amplified DNA can be cloned into a suitable cloning vector.

[0322] Polynucleotides or primers for use in the invention may carry a revealing label. Suitable labels include radioisotopes such as ³²P or ³⁵S, enzyme labels, or other protein labels such as biotin. Such labels may be added to polynucleotides or primers of the invention and may be detected by using techniques well known by those in the art.

[0323] Polynucleotides or primers for use in the invention or fragments thereof labeled or unlabeled may be used by a person skilled in the art in nucleic acid-based tests for detecting or sequencing polynucleotides of the invention in the human or animal body.

[0324] Such tests for detecting generally comprise bringing a biological sample containing DNA or RNA into contact with a probe comprising a polynucleotide or primer of the invention under hybridising conditions and detecting any duplex formed between the probe and nucleic acid in the sample. Such detection may be achieved using techniques such as PCR or by immobilising the probe on a solid support, removing nucleic acid in the sample which is not hybridised to the probe, and then detecting nucleic acid which has hybridised to the probe. Alternatively, the sample nucleic acid may be immobilised on a solid support, and the amount of probe bound to such a support can be detected. Suitable assay methods of this and other formats can be found in for example WO 89/03891 and WO 90/13667.

[0325] Tests for sequencing nucleotides for use in the invention include bringing a biological sample containing target DNA or RNA into contact with a probe comprising a polynucleotide or primer of the invention under hybridising conditions and determining the sequence by, for example the Sanger dideoxy chain termination method (see Sambrook et al.).

[0326] Such a method generally comprises elongating, in the presence of suitable reagents, the primer by synthesis of a strand complementary to the target DNA or RNA and selectively terminating the elongation reaction at one or more of an A, C, G or T/U residue; allowing strand elongation and termination reaction to occur; separating out according to size the elongated products to determine the sequence of the nucleotides at which selective termination has occurred. Suitable reagents include a DNA polymerase enzyme, the deoxynucleotides dATP, dCTP, dGTP and dTTP, a buffer and ATP. Dideoxynucleotides are used for selective termination.

[0327] Tests for detecting or sequencing nucleotides identified in Table 1 in a biological sample may be used to determine particular sequences within cells in individuals who have, or are suspected to have, an altered gene sequence, for example within cancer cells including leukaemia cells and solid tumours such as breast, ovary, lung, colon, pancreas, testes, liver, brain, muscle and bone tumours. Cells from patients suffering from a proliferative disease may also be tested in the same way.

[0328] In addition, the identification of the genes described in the Examples will allow the role of these genes in hereditary diseases to be investigated. In general, this will involve establishing the status of the gene (e.g., using PCR sequence analysis), in cells derived from animals or humans with, for example, neoplasms.

[0329] The probes for use in the invention may conveniently be packaged in the form of a test kit in a suitable container. In such kits the probe may be bound to a solid support where the assay format for which the kit is designed requires such binding. The kit may also contain suitable reagents for treating the sample to be probed, hybridising the probe to nucleic acid in the sample, control reagents, instructions, and the like.

Homology Searching

[0330] Sequence homology (or identity) may be determined using any suitable homology algorithm, using for example default parameters.

[0331] Advantageously, the BLAST algorithm is employed, with parameters set to default values. The BLAST algorithm is described in detail at the world wide web site (“www”) of the National Center for Biotechnology Information (“.ncbi”) of the National Institutes of Health (“nih”) of the U.S. government (“.gov”), in the “/Blast/” directory, in the “blast_help.html” file. The search parameters are defined as follows, and are advantageously set to the defined default parameters.

[0332] Advantageously, “substantial homology” when assessed by BLAST equates to sequences which match with an EXPECT value of at least about 7, preferably at least about 9 and most preferably 10 or more. The default threshold for EXPECT in BLAST searching is usually 10.

[0333] BLAST (Basic Local Alignment Search Tool) is the heuristic search algorithm employed by the programs blastp, blastn, blastx, tblastn, and tblastx; these programs ascribe significance to their findings using the statistical methods of Karlin and Altschul, 1990, Proc. Natl. Acad. Sci. USA 87(6):2264-8 (see the “blast_help.html” file, as described above) with a few enhancements. The BLAST programs were tailored for sequence similarity searching, for example to identify homologues to a query sequence. The programs are not generally useful for motif-style searching. For a discussion of basic issues in similarity searching of sequence databases, see Altschul et al. (1994).

[0334] The five BLAST programs available at the National Center for Biotechnology Information web site perform the following tasks:

[0335] “blastp” compares an amino acid query sequence against a protein sequence database;

[0336] “blastn” compares a nucleotide query sequence against a nucleotide sequence database;

[0337] “blastx” compares the six-frame conceptual translation products of a nucleotide query sequence (both strands) against a protein sequence database;

[0338] “tblastn” compares a protein query sequence against a nucleotide sequence database dynamically translated in all six reading frames (both strands).

[0339] “tblastx” compares the six-frame translations of a nucleotide query sequence against the six-frame translations of a nucleotide sequence database.

[0340] BLAST uses the following search parameters:

[0341] HISTOGRAM Display a histogram of scores for each search; default is yes. (See parameter H in the BLAST Manual).

[0342] DESCRIPTIONS Restricts the number of short descriptions of matching sequences reported to the number specified; default limit is 100 descriptions. (See parameter V in the manual page). See also EXPECT and CUTOFF.

[0343] ALIGNMENTS Restricts database sequences to the number specified for which high-scoring segment pairs (HSPs) are reported; the default limit is 50. If more database sequences than this happen to satisfy the statistical significance threshold for reporting (see EXPECT and CUTOFF below), only the matches ascribed the greatest statistical significance are reported. (See parameter B in the BLAST Manual).

[0344] EXPECT The statistical significance threshold for reporting matches against database sequences; the default value is 10, such that 10 matches are expected to be found merely by chance, according to the stochastic model of Karlin and Altschul (1990). If the statistical significance ascribed to a match is greater than the EXPECT threshold, the match will not be reported. Lower EXPECT thresholds are more stringent, leading to fewer chance matches being reported. Fractional values are acceptable. (See parameter E in the BLAST Manual).

[0345] CUTOFF Cutoff score for reporting high-scoring segment pairs. The default value is calculated from the EXPECT value (see above). HSPs are reported for a database sequence only if the statistical significance ascribed to them is at least as high as would be ascribed to a lone HSP having a score equal to the CUTOFF value. Higher CUTOFF values are more stringent, leading to fewer chance matches being reported. (See parameter S in the BLAST Manual). Typically, significance thresholds can be more intuitively managed using EXPECT.

[0346] MATRIX Specify an alternate scoring matrix for BLASTP, BLASTX, TBLASTN and TBLASTX. The default matrix is BLOSUM62 (Henikoff & Henikoff, 1992, Proc. Natl. Aacad. Sci. USA 89(22):10915-9). The valid alternative choices include: PAM40, PAM120, PAM250 and IDENTITY. No alternate scoring matrices are available for BLASTN; specifying the MATRIX directive in BLASTN requests returns an error response.

[0347] STRAND Restrict a TBLASTN search to just the top or bottom strand of the database sequences; or restrict a BLASTN, BLASTX or TBLASTX search to just reading frames on the top or bottom strand of the query sequence.

[0348] FILTER Mask off segments of the query sequence that have low compositional complexity, as determined by the SEG program of Wootton & Federhen (1993) Computers and Chemistry 17:149-163, or segments consisting of short-periodicity internal repeats, as determined by the XNU program of Clayerie & States, 1993, Computers and Chemistry 17:191-201, or, for BLASTN, by the DUST program of Tatusov and Lipman (see the world wide web site of the NCBI). Filtering can eliminate statistically significant but biologically uninteresting reports from the blast output (e.g., hits against common acidic-, basic- or proline-rich regions), leaving the more biologically interesting regions of the query sequence available for specific matching against database sequences.

[0349] Low complexity sequence found by a filter program is substituted using the letter “N” in nucleotide sequence (e.g., “N” repeated 13 times) and the letter “X” in protein sequences (e.g., “X” repeated 9 times).

[0350] Filtering is only applied to the query sequence (or its translation products), not to database sequences. Default filtering is DUST for BLASTN, SEG for other programs.

[0351] It is not unusual for nothing at all to be masked by SEG, XNU, or both, when applied to sequences in SWISS-PROT, so filtering should not be expected to always yield an effect. Furthermore, in some cases, sequences are masked in their entirety, indicating that the statistical significance of any matches reported against the unfiltered query sequence should be suspect.

[0352] NCBI-gi Causes NCBI gi identifiers to be shown in the output, in addition to the accession and/or locus name.

[0353] Most preferably, sequence comparisons are conducted using the simple BLAST search algorithm provided at the NCBI world wide web site described above, in the “/BLAST” directory.

Antibodies

[0354] The invention also provides the use of monoclonal or polyclonal antibodies to polypeptides encoded by the nucleic acids identified in Table 1 or fragments thereof.

[0355] Methods for production of antibodies are known by those skilled in the art. If polyclonal antibodies are desired, a selected mammal (e.g., mouse, rabbit, goat, horse, etc.) is immunised with an immunogenic polypeptide bearing an epitope(s) from a polypeptide. Serum from the immunised animal is collected and treated according to known procedures. If serum containing polyclonal antibodies to an epitope from a polypeptide contains antibodies to other antigens, the polyclonal antibodies can be purified by immunoaffinity chromatography. Techniques for producing and processing polyclonal antisera are known in the art. In order to generate a larger immunogenic response, polypeptides or fragments thereof maybe haptenised to another polypeptide for use as immunogens in animals or humans.

[0356] Monoclonal antibodies directed against epitopes in polypeptides can also be readily produced by one skilled in the art. The general methodology for making monoclonal antibodies by hybridomas is well known. Immortal antibody-producing cell lines can be created by cell fusion, and also by other techniques such as direct transformation of B lymphocytes with oncogenic DNA, or transfection with Epstein-Barr virus. Panels of monoclonal antibodies produced against epitopes in the polypeptides of the invention can be screened for various properties; i.e., for isotype and epitope affinity.

[0357] An alternative technique involves screening phage display libraries where, for example the phage express scFv fragments on the surface of their coat with a large variety of complementarity determining regions (CDRs). This technique is well known in the art.

[0358] Antibodies, both monoclonal and polyclonal, which are directed against epitopes from polypeptides encoded by the nucleic acids identified in Table 1 are particularly useful in diagnosis, and those which are neutralising are useful in passive immunotherapy. Monoclonal antibodies, in particular, may be used to raise anti-idiotype antibodies. Anti-idiotype antibodies are immunoglobulins which carry an “internal image” of the antigen of the agent against which protection is desired.

[0359] Techniques for raising anti-idiotype antibodies are known in the art. These anti-idiotype antibodies may also be useful in therapy.

[0360] For the purposes of this invention, the term “antibody”, unless specified to the contrary, includes fragments of whole antibodies which retain their binding activity for a target antigen. Such fragments include Fv, F(ab′) and F(ab′)₂ fragments, as well as single chain antibodies (scFv). Furthermore, the antibodies and fragments thereof may be humanised antibodies, for example as described in EP-A-239400.

[0361] Antibodies may be used in detecting cell cycle progression polypeptides identified herein in biological samples by a method which comprises: (a) providing an antibody of the invention; (b) incubating a biological sample with said antibody under conditions which allow for the formation of an antibody-antigen complex; and (c) determining whether antibody-antigen complex comprising said antibody is formed.

[0362] Suitable samples include extracts tissues such as brain, breast, ovary, lung, colon, pancreas, testes, liver, muscle and bone tissues or from neoplastic growths derived from such tissues.

[0363] Antibodies that specifically bind to the cell cycle progression proteins can be used in diagnostic methods and kits that are well known to those of ordinary skill in the art to detect or quantify the cell cycle progression proteins in a body fluid or tissue. Results from these tests can be used to diagnose or predict the occurrence or recurrence of a cancer and other cell cycle progression-mediated diseases.

[0364] The invention also includes use of the cell cycle progression proteins, antibodies to those proteins, and compositions comprising those proteins and/or their antibodies in diagnosis or prognosis of diseases characterized by proliferative activity. As used herein, the term “prognostic method” means a method that enables a prediction regarding the progression of a disease of a human or animal diagnosed with the disease, in particular, a cell cycle progression-dependent disease. The term “diagnostic method” as used herein means a method that enables a determination of the presence or type of cell cycle progression-dependent disease in or on a human or animal.

[0365] The cell cycle progression proteins can be used in a diagnostic method and kit to detect and quantify antibodies capable of binding the proteins. These kits would permit detection of circulating antibodies to the cell cycle progression proteins which indicates, e.g., the proliferation of cancer cells. Patients that have such circulating anti-protein antibodies may be more likely to develop multiple tumors and cancers, and may be more likely to have recurrences of cancer after treatments or periods of remission.

[0366] Antibodies for use in the invention may be bound to a solid support and/or packaged into kits in a suitable container along with suitable reagents, controls, instructions and the like.

[0367] When used in a diagnostic composition, an antibody is preferably provided together with means for detecting the antibody, which can be enzymatic, fluorescent, radioisotopic or other means. The antibody and the detection means can be provided for simultaneous, simultaneous separate or sequential use, in a diagnostic kit intended for diagnosis.

Measuring Expression of Cell Cycle Progression Genes

[0368] Levels of gene expression may be determined using a number of different techniques.

a) at the RNA Level

[0369] Gene expression can be detected at the RNA level. RNA may be extracted from cells using RNA extraction techniques including, for example, using acid phenol/guanidine isothiocyanate extraction (RNAzol B; Biogenesis), or RNeasy RNA preparation kits (Qiagen).Typical assay formats utilising ribonucleic acid hybridisation include nuclear run-on assays, RT-PCR and RNase protection assays (Melton et al., Nuc. Acids Res. 12:7035. Methods for detection which can be employed include radioactive labels, enzyme labels, chemiluminescent labels, fluorescent labels and other suitable labels.

[0370] Typically, RT-PCR is used to amplify RNA targets. In this process, the reverse transcriptase enzyme is used to convert RNA to complementary DNA (cDNA) which can then be amplified to facilitate detection.

[0371] Many DNA amplification methods are known, most of which rely on an enzymatic chain reaction (such as a polymerase chain reaction, a ligase chain reaction, or a self-sustained sequence replication) or from the replication of all or part of the vector into which it has been cloned.

[0372] Many target and signal amplification methods have been described in the literature, for example, general reviews of these methods in Landegren, U. et al., Science 242:229-237 (1988) and Lewis, R., Genetic Engineering News 10:1, 54-55 (1990).

[0373] PCR is a nucleic acid amplification method described inter alia in U.S. Pat. Nos. 4,683,195 and 4,683,202. PCR can be used to amplify any known nucleic acid in a diagnostic context (Mok et al., 1994, Gynaecologic Oncology 52:247-252). Self-sustained sequence replication (3SR) is a variation of TAS, which involves the isothermal amplification of a nucleic acid template via sequential rounds of reverse transcriptase (RT), polymerase and nuclease activities that are mediated by an enzyme cocktail and appropriate oligonucleotide primers (Guatelli et al., 1990, Proc. Natl. Acad. Sci. USA 87:1874). Ligation amplification reaction or ligation amplification system uses DNA ligase and four oligonucleotides, two per target strand. This technique is described by Wu, D. Y. and Wallace, R. B., 1989, Genomics 4:560. In the Qβ Replicase technique, RNA replicase for the bacteriophage Qβ, which replicates single-stranded RNA, is used to amplify the target DNA, as described by Lizardi et al., 1988, Bio/Technology 6:1197.

[0374] Alternative amplification technology can be exploited in the present invention. For example, rolling circle amplification (Lizardi et al., 1998, Nat Genet 19:225) is an amplification technology available commercially (RCAT™) which is driven by DNA polymerase and can replicate circular oligonucleotide probes with either linear or geometric kinetics under isothermal conditions. A further technique, strand displacement amplification (SDA; Walker et al., 1992, Proc. Natl. Acad. Sci. USA 80:392) begins with a specifically defined sequence unique to a specific target.

b) at the Polypeptide Level

[0375] Gene expression may also be detected by measuring the cell cycle progression polypeptides. This may be achieved by using molecules which bind to the cell cycle progression polypeptides. Suitable molecules/agents which bind either directly or indirectly to the cell cycle progression polypeptides in order to detect the presence of the protein include naturally occurring molecules such as peptides and proteins, for example antibodies, or they may be synthetic molecules.

[0376] Standard laboratory techniques such as immunoblotting as described above can be used to detect altered levels of cell cycle progression proteins, as compared with untreated cells in the same cell population.

[0377] Gene expression may also be determined by detecting changes in post-translational processing of polypeptides or post-transcriptional modification of nucleic acids. For example, differential phosphorylation of polypeptides, the cleavage of polypeptides or alternative splicing of RNA, and the like may be measured. Levels of expression of gene products such as polypeptides, as well as their post-translational modification, may be detected using proprietary protein assays or techniques such as 2D polyacrylamide gel electrophoresis.

[0378] Antibodies can be assayed for immunospecific binding by any method known in the art. The immunoassays which can be used include but are not limited to competitive and non-competitive assay systems using techniques such as western blots, radioimmunoassays, ELISA, sandwich immunoassays, immunoprecipitation assays, precipitin reactions, gel diffusion precipitin reactions, immunodiffusion assays, agglutination assays, complement-fixation assays, immunoradiometric assays, fluorescent immunoassays and protein A immunoassays. Such assays are routine in the art (see, for example, Ausubel et al., eds, 1994, Current Protocols in Molecular Biology, Vol. 1, John Wiley & Sons, Inc., New York, which is incorporated by reference herein in its entirety).

Arrays

[0379] Array technology and the various techniques and applications associated with it is described generally in numerous textbooks and documents. These include Lemieux et al., 1998, Molecular Breeding 4:277-289; Schena and Davis. Parallel Analysis with Biological Chips. in PCR Methods Manual (eds. M. Innis, D. Gelfand, J. Sninsky); Schena and Davis, 1999, Genes, Genomes and Chips. In DNA Microarrays: A Practical Approach (ed. M. Schena), Oxford University Press, Oxford, UK, 1999); The Chipping Forecast (Nature Genetics special issue; January 1999 Supplement); Mark Schena (Ed.), Microarray Biochip Technology, (Eaton Publishing Company); Cortes, 2000, The Scientist 14(17):25; Gwynne and Page, Microarray analysis: the next revolution in molecular biology, Science, 1999, August 6; Eakins and Chu, 1999, Trends in Biotechnology, 17:217-218, and also at various world wide web sites.

[0380] Array technology overcomes the disadvantages with traditional methods in molecular biology, which generally work on a “one gene in one experiment” basis, resulting in low throughput and the inability to appreciate the “whole picture” of gene function. Currently, the major applications for array technology include the identification of sequence (gene/gene mutation) and the determination of expression level (abundance) of genes. Gene expression profiling may make use of array technology, optionally in combination with proteomics techniques (Celis et al., 2000, FEBS Lett, 480(1):2-16; Lockhart and Winzeler, 2000, Nature 405(6788):827-836; Khan et al., 1999, 20(2):223-9). Other applications of array technology are also known in the art; for example, gene discovery, cancer research (Marx, 2000, Science 289: 1670-1672; Scherf et al et al., 2000, Nat Genet 24(3):236-44; Ross et al., 2000, Nat Genet 2000, 24(3):227-35), SNP analysis (Wang et al., 1998, Science 280(5366):1077-82), drug discovery, pharmacogenomics, disease diagnosis (for example, utilising microfluidics devices: Chemical & Engineering News, Feb. 22, 1999, 77(8):27-36), toxicology (Rockett and Dix (2000), Xenobiotica 30(2):155-77; Afshari et al., 1999, Cancer Res 59(19):4759-60) and toxicogenomics (a hybrid of functional genomics and molecular toxicology). The goal of toxicogenomics is to find correlations between toxic responses to toxicants and changes in the genetic profiles of the objects exposed to such toxicants (Nuwaysir et al., 1999, Molecular Carcinogenesis 24:153-159).

[0381] In the context of the present invention, array technology can be used, for example, in the analysis of the expression of one or more of the cell cycle progression proteins identified herein. In one embodiment, array technology may be used to assay the effect of a candidate compound on a number of the cell cycle progression proteins identified herein simultaneously. Accordingly, another aspect of the present invention is to provide microarrays that include at least one, at least two or at least several of the nucleic acids identified in Table 1, or fragments thereof, or protein or antibody arrays.

[0382] In general, any library or group of samples may be arranged in an orderly manner into an array, by spatially separating the members of the library or group. Examples of suitable libraries for arraying include nucleic acid libraries (including DNA, cDNA, oligonucleotide, etc. libraries), peptide, polypeptide and protein libraries, as well as libraries comprising any molecules, such as ligand libraries, among others. Accordingly, where reference is made to a “library” in this document, unless the context dictates otherwise, such reference should be taken to include reference to a library in the form of an array. In the context of the present invention, a “library” may include a sample of cell cycle progression proteins as identified herein.

[0383] The samples (e.g., members of a library) are generally fixed or immobilised onto a solid phase, preferably a solid substrate, to limit diffusion and admixing of the samples. In a preferred embodiment, libraries of DNA binding ligands may be prepared. In particular, the libraries may be immobilised to a substantially planar solid phase, including membranes and non-porous substrates such as plastic and glass. Furthermore, the samples are preferably arranged in such a way that indexing (i.e., reference or access to a particular sample) is facilitated. Typically the samples are applied as spots in a grid formation. Common assay systems may be adapted for this purpose. For example, an array may be immobilised on the surface of a microplate, either with multiple samples in a well, or with a single sample in each well. Furthermore, the solid substrate may be a membrane, such as a nitrocellulose or nylon membrane (for example, membranes used in blotting experiments). Alternative substrates include glass, or silica based substrates. Thus, the samples are immobilised by any suitable method known in the art, for example, by charge interactions, or by chemical coupling to the walls or bottom of the wells, or the surface of the membrane. Other means of arranging and fixing may be used, for example, pipetting, drop-touch, piezoelectric means, ink-jet and bubble jet technology, electrostatic application, etc. In the case of silicon-based chips, photolithography may be utilised to arrange and fix the samples on the chip.

[0384] The samples may be arranged by being “spotted” onto the solid substrate; this may be done by hand or by making use of robotics to deposit the sample. In general, arrays may be described as macroarrays or microarrays, the difference being the size of the sample spots. Macroarrays typically contain sample spot sizes of about 300 microns or larger and may be easily imaged by existing gel and blot scanners. The sample spot sizes in microarrays are typically less than 200 microns in diameter and these arrays usually contain thousands of spots. Thus, microarrays may require specialized robotics and imaging equipment, which may need to be custom made. Instrumentation is described generally in a review by Cortese, 2000, The Scientist 14(11):26.

[0385] Techniques for producing immobilised libraries of DNA molecules have been described in the art. Generally, most prior art methods described how to synthesise single-stranded nucleic acid molecule libraries, using for example masking techniques to build up various permutations of sequences at the various discrete positions on the solid substrate. U.S. Pat. No. 5,837,832, the contents of which are incorporated herein by reference, describes an improved method for producing DNA arrays immobilised to silicon substrates based on very large scale integration technology. In particular, U.S. Pat. No. 5,837,832 describes a strategy called “tiling” to synthesize specific sets of probes at spatially-defined locations on a substrate which may be used to produced the immobilised DNA libraries of the present invention. U.S. Pat. No. 5,837,832 also provides references for earlier techniques that may also be used.

[0386] Arrays of peptides (or peptidomimetics) may also be synthesised on a surface in a manner that places each distinct library member (e.g., unique peptide sequence) at a discrete, predefined location in the array. The identity of each library member is determined by its spatial location in the array. The locations in the array where binding interactions between a predetermined molecule (e.g., a target or probe) and reactive library members occur is determined, thereby identifying the sequences of the reactive library members on the basis of spatial location. These methods are described in U.S. Pat. No. 5,143,854; WO 90/15070 and WO 92/10092; Fodor et al., 1991, Science 251:767; Dower and Fodor, 1991, Ann. Rep. Med. Chem. 26:271.

[0387] To aid detection, targets and probes may be labelled with any readily detectable reporter, for example, a fluorescent, bioluminescent, phosphorescent, radioactive, etc reporter. Such reporters, their detection, coupling to targets/probes, etc are discussed elsewhere in this document. Labelling of probes and targets is also disclosed in Shalon et al., 1996, Genome Res 6(7):639-45.

[0388] Specific examples of DNA arrays include the following:

[0389] Format I: probe cDNA (500-˜5,000 bases long) is immobilized to a solid surface such as glass using robot spotting and exposed to a set of targets either separately or in a mixture. This method is widely considered as having been developed at Stanford University (Ekins and Chu, 1999, Trends in Biotechnology, 17:217-218).

[0390] Format II: an array of oligonucleotide (˜20-˜25-mer oligos) or peptide nucleic acid (PNA) probes is synthesized either in situ (on-chip) or by conventional synthesis followed by on-chip immobilization. The array is exposed to labeled sample DNA, hybridized, and the identity/abundance of complementary sequences are determined. Such a DNA chip is sold by Affymetrix, Inc., under the GeneChipg trademark.

[0391] Examples of some commercially available microarray formats are set out, for example, in Marshall and Hodgson, 1998, Nature Biotechnology 16(1):27-31.

[0392] Data analysis is also an important part of an experiment involving arrays. The raw data from a microarray experiment typically are images, which need to be transformed into gene expression matrices—tables where rows represent for example genes, columns represent for example various samples such as tissues or experimental conditions, and numbers in each cell for example characterize the expression level of the particular gene in the particular sample. These matrices have to be analyzed further, if any knowledge about the underlying biological processes is to be extracted. Methods of data analysis (including supervised and unsupervised data analysis as well as bioinformatics approaches) are disclosed in Brazma and Vilo J, 2000, FEBS Lett 480(1): 17-24.

[0393] As disclosed above, proteins, polypeptides, etc may also be immobilised in arrays. For example, antibodies have been used in microarray analysis of the proteome using protein chips (Borrebaeck Calif., 2000, Immunol Today 21(8):379-82). Polypeptide arrays are reviewed in, for example, MacBeath and Schreiber, 2000, Science, 289(5485):1760-1763.

Modifying the Functional Activity of a Cell Cycle Progression Protein

[0394] The functional activity of a cell cycle progression protein may be modified by suitable molecules/agents which bind either directly or indirectly to a cell cycle progression protein, or to the nucleic acid encoding it. Agents may be naturally occurring molecules such as peptides and proteins, for example antibodies, or they may be synthetic molecules. Methods of modulating the level of expression of a cell cycle progression protein include, for example, using antisense techniques.

[0395] Antisense constructs, i.e., nucleic acid, preferably RNA, constructs complementary to the sense nucleic acid or mRNA, are described in detail in U.S. Pat. No. 6,100,090 (Monia et al.), and Neckers et al., 1992, Crit Rev Oncog 3(1-2):175-231, the teachings of which document are specifically incorporated by reference. Other methods of modulating gene expression are known to those skilled in the art and include dominant negative approaches as well as introducing peptides or small molecules which inhibit gene expression or functional activity.

[0396] RNA interference (RNAi) is a method of post transcriptional gene silencing (PTGS) induced by the direct introduction of double-stranded RNA (dsRNA) and has emerged as a useful tool to knock out expression of specific genes in a variety of organisms. RNAi is described by Fire et al., Nature 391:806-811 (1998). Other methods of PTGS are known and include, for example, introduction of a transgene or virus. Generally, in PTGS, the transcript of the silenced gene is synthesised but does not accumulate because it is rapidly degraded. Methods for PTGS, including RNAi are described, for example, in the Ambion.com world wide web site, in the directory “/hottopics/”, in the “mai” file.

[0397] Suitable methods for RNAi in vitro are described herein. One such method involves the introduction of siRNA (small interfering RNA). Current models indicate that these 21-23 nucleotide dsRNAs can induce PTGS. Methods for designing effective siRNAs are described, for example, in the Ambion web site described above. RNA precursers can also be encoded by all or a part of one of the cell cycle progression nucleic acid sequences described herein.

Assays

[0398] The present invention provides assays that are suitable for identifying substances which bind to polypeptides of the invention and which affect, for example, formation of the nuclear envelope, exit from the quiescent phase of the cell cycle (G0), G1 progression, chromosome decondensation, nuclear envelope breakdown, START, initiation of DNA replication, progression of DNA replication, termination of DNA replication, centrosome duplication, G2 progression, activation of mitotic or meiotic functions, chromosome condensation, centrosome separation, microtubule nucleation, spindle formation and function, interactions with microtubule motor proteins, chromatid separation and segregation, inactivation of mitotic functions, formation of contractile ring, cytokinesis functions, chromatin binding, formation of replication complexes, replication licensing, phosphorylation or other secondary modification activity, proteolytic degradation, microtubule binding, actin binding, septin binding, microtubule organising centre nucleation activity and binding to components of cell cycle signalling pathways.

[0399] In general, a substance which inhibits one or more of these aspects of cell cycle progression either inhibits it completely, or leads to a significant (i.e., greater than 50%) reduction in protein activity at concentrations of 500 mM or less, relative to controls. Preferably, the inhibition is by 75% relative to controls, more preferably by 90%, and most preferably by 95% or 100% relative to controls. A substance which enhances or increases one or more of these aspects of cell cycle progression leads to a significant (i.e., greater than 50%) increase in protein activity at concentrations of 500 mM or less, relative to controls. Preferably, the increase is by 75% relative to controls, more preferably by 90%, and most preferably by 95% or 100% relative to controls.

[0400] In addition, assays can be used to identify substances that interfere with binding of polypeptides of the invention, where appropriate, to components of cell division cycle machinery. Such assays are typically in vitro. Assays are also provided that test the effects of candidate substances identified in preliminary in vitro assays on intact cells in whole cell assays. The assays described below, or any suitable assay as known in the art, may be used to identify these substances.

[0401] According to one aspect of the invention, therefore, we provide one or more substances identified by any of the assays described below, viz, mitosis assays, meiotic assays, polypeptide binding assays, microtubule binding/polymerisation assays, microtubule purification and binding assays, microtubule organising centre (MTOC) nucleation activity assays, motor protein assay, assay for spindle assembly and function, assays for DNA replication, chromosome condensation assays, kinase assays, kinase inhibitor assays, and whole cell assays, each as described in further detail below.

Modulator Screening Assays

[0402] Compounds having inhibitory, activating, or modulating activity can be identified using in vitro and in vivo assays for cell cycle progression protein activity and/or expression, e.g., ligands, agonists, antagonists, and their homologs and mimetics. Modulator screening may be performed by adding a putative modulator test compound to a tissue or cell sample, and monitoring the effect of the test compound on the function and/or expression of a cell cycle progression protein. A parallel sample which does not receive the test compound is also monitored as a control. The treated and untreated cells are then compared by any suitable phenotypic criteria, including but not limited to microscopic analysis, viability testing, ability to replicate, histological examination, the level of a particular RNA or polypeptide associated with the cells, the level of enzymatic activity expressed by the cells or cell lysates, and the ability of the cells to interact with other cells or compounds.

[0403] Methods for inducing cell cycle progression are well known in the art and include, without limitation, exposure to growth factors. Differences between treated and untreated cells indicates effects attributable to the test compound.

[0404] A substance that inhibits cell cycle progression as a result of an interaction with a polypeptide of the invention may do so in several ways. For example, if the substance inhibits cell division, mitosis and/or meiosis, it may directly disrupt the binding of a polypeptide of the invention to a component of the spindle apparatus by, for example, binding to the polypeptide and masking or altering the site of interaction with the other component. A substance which inhibits DNA replication may do so by inhibiting the phosphorylation or de-phosphorylation of proteins involved in replication. For example, it is known that the kinase inhibitor 6-DMAP (6-dimethylaminopurine) prevents the initiation of replication (Blow, J. J., 1993, J Cell Biol 122:993-1002). Candidate substances of this type may conveniently be preliminarily screened by in vitro binding assays as, for example, described below and then tested, for example in a whole cell assay as described below. Examples of candidate substances include antibodies which recognise a polypeptide of the invention.

[0405] A substance which can bind directly to a polypeptide of the invention may also inhibit its function in cell cycle progression by altering its subcellular localisation and hence its ability to interact with its normal substrate. The substance may alter the subcellular localisation of the polypeptide by directly binding to it, or by indirectly disrupting the interaction of the polypeptide with another component. For example, it is known that interaction between the p68 and p180 subunits of DNA polymerase alpha-primase enzyme is necessary in order for p180 to translocate into the nucleus (Mizuno et al., 1998, Mol Cell Biol 18:3552-62), and accordingly, a substance which disrupts the interaction between p68 and p180 will affect nuclear translocation and hence activity of the primase. A substance which affects mitosis may do so by preventing the polypeptide and components of the mitotic apparatus from coming into contact within the cell.

[0406] These substances may be tested using, for example the whole cells assays described below. Non-functional homologues of a polypeptide of the invention may also be tested for inhibition of cell cycle progression since they may compete with the wild type protein for binding to components of the cell division cycle machinery whilst being incapable of the normal functions of the protein or block the function of the protein bound to the cell division cycle machinery. Such non-functional homologues may include naturally occurring mutants and modified sequences or fragments thereof.

[0407] Alternatively, instead of preventing the association of the components directly, the substance may suppress the biologically available amount of a polypeptide of the invention. This may be by inhibiting expression of the component, for example at the level of transcription, transcript stability, translation or post-translational stability. An example of such a substance would be antisense RNA or double-stranded interfering RNA sequences which suppresses the amount of mRNA biosynthesis.

[0408] Suitable candidate substances include peptides, especially of from about 5 to 30 or 10 to 25 amino acids in size, based on the sequence of the polypeptides described in the Examples, or variants of such peptides in which one or more residues have been substituted. Peptides from panels of peptides comprising random sequences or sequences which have been varied consistently to provide a maximally diverse panel of peptides may be used.

[0409] Suitable candidate substances also include antibody products (for example, monoclonal and polyclonal antibodies, single chain antibodies, chimeric antibodies and CDR-grafted antibodies) which are specific for a polypeptide of the invention. Furthermore, combinatorial libraries, peptide and peptide mimetics, defined chemical entities, oligonucleotides, and natural product libraries may be screened for activity as inhibitors of binding of a polypeptide of the invention to the cell division cycle machinery, for example mitotic/meiotic apparatus (such as microtubules). The candidate substances may be used in an initial screen in batches of, for example 10 substances per reaction, and the substances of those batches which show inhibition tested individually. Candidate substances which show activity in in vitro screens such as those described below can then be tested in whole cell systems, such as mammalian cells which will be exposed to the inhibitor and tested for inhibition of any of the stages of the cell cycle.

[0410] A substance is identified as a modulator of cell cycle progression activity when it is found to inhibit, decrease, increase, enhance, or activate such activity. In general, a substance which inhibits one or more of these aspects of cell cycle progression either inhibits it completely, or leads to a significant (i.e., greater than 50%) reduction in protein activity at concentrations of 500 mM or less, relative to controls (i.e., substance known to not modulate one or more aspects of cell cycle progression). Preferably, the inhibition is by 75% relative to controls, more preferably by 90%, and most preferably by 95% or 100% relative to controls. The inhibition may prevent cell cycle progression, or may simply delay or prolong cell cycle progression. A substance which enhances or increases one or more of these aspects of cell cycle progression leads to a significant (i.e., greater than 50%) increase in protein activity at concentrations of 500 mM or less, relative to controls. Preferably, the increase is by 75% relative to controls, more preferably by 90%, and most preferably by 95% or 100% relative to controls.

Polypeptide Binding Assays

[0411] One type of assay for identifying substances that bind to a polypeptide of the invention involves contacting a polypeptide of the invention, which is immobilised on a solid support, with a non-immobilised candidate substance determining whether and/or to what extent the polypeptide of the invention and candidate substance bind to each other. Alternatively, the candidate substance may be immobilised and the polypeptide of the invention non-immobilised.

[0412] The binding of the substance to the cell cycle progression polypeptide can be transient, reversible or permanent. Preferably the substance binds to the polypeptide with a Kd value which is lower than the Kd value for binding to control polypeptides (i.e., polypeptides known to not be cell cycle progression polypeptides). Preferably the Kd value of the substance is 2 fold less than the Kd value for binding to control polypeptides, more preferably with a Kd value 100 fold less, and most preferably with a Kd 1000 fold less than that for binding to the control polypeptide.

[0413] In a preferred assay method, the polypeptide of the invention is immobilised on beads such as agarose beads. Typically this is achieved by expressing the component as a GST-fusion protein in bacteria, yeast or higher eukaryotic cell lines and purifying the GST-fusion protein from crude cell extracts using glutathione-agarose beads (Smith and Johnson, 1988; Gene 67(10):31-40). As a control, binding of the candidate substance, which is not a GST-fusion protein, to the immobilised polypeptide of the invention is determined in the absence of the polypeptide of the invention. The binding of the candidate substance to the immobilised polypeptide of the invention is then determined. This type of assay is known in the art as a GST pulldown assay. Again, the candidate substance may be immobilised and the polypeptide of the invention non-immobilised.

[0414] It is also possible to perform this type of assay using different affinity purification systems for immobilising one of the components, for example Ni-NTA agarose and histidine-tagged components.

[0415] Binding of the polypeptide of the invention to the candidate substance may be determined by a variety of methods well-known in the art. For example, the non-immobilised component may be labeled (with for example, a radioactive label, an epitope tag or an enzyme-antibody conjugate). Alternatively, binding may be determined by immunological detection techniques. For example, the reaction mixture can be Western blotted and the blot probed with an antibody that detects the non-immobilised component. ELISA techniques may also be used.

[0416] Candidate substances are typically added to a final concentration of from 1 to 1000 nmol/ml, more preferably from 1 to 100 nmol/ml. In the case of antibodies, the final concentration used is typically from 100 to 500 μg/ml, more preferably from 200 to 300 μg/ml.

Microtubule Binding/Polymerisation Assays

[0417] In the case of cell cycle progression polypeptides that bind to microtubules, another type of in vitro assay involves determining whether a candidate substance modulates binding of a polypeptide of the invention to microtubules. Such an assay typically comprises contacting a polypeptide with microtubules in the presence or absence of the candidate substance and determining if the candidate substance has an affect on the binding of the polypeptide to the microtubules. This assay can also be used in the absence of candidate substances to confirm that a polypeptide does indeed bind to microtubules.

[0418] The binding of the substance to the cell cycle progression polypeptide can be transient, reversible or permanent. Preferably the substance binds to the polypeptide with a Kd value which is lower than the Kd value for binding to control polypeptides (i.e., polypeptides known to not be cell cycle progression polypeptides). Preferably the Kd value of the substance is 2 fold less than the Kd value for binding to control polypeptides, more preferably with a Kd value 100 fold less, and most preferably with a Kd 1000 fold less than that for binding to the control polypeptide.

[0419] Microtubules may be prepared and assays conducted as follows.

Microtubule Purification and Binding Assays

[0420] Microtubules are purified from 0-3 h-old Drosophila embryos essentially as described previously (Saunders et al., 1997, J. Cell Biol. 137(4):881-90). About 3 ml of embryos are homogenized with a Dounce homogenizer in 2 volumes of ice-cold lysis buffer (0.1 M Pipes/NaOH, pH6.6, 5 mM EGTA, 1 mM MgSO₄, 0.9 M glycerol, 1 mM DTT, 1 mM PMSF, 1 μg/ml aprotinin, 1 μg/ml leupeptin and 1 μg/ml pepstatin). The microtubules are depolymerized by incubation on ice for 15 min, and the extract is then centrifuged at 16,000 g for 30 minutes at 4° C. The supernatant is recentrifuged at 135,000 g for 90 minutes at 4° C. Microtubules in this later supernatant are polymerized by addition of GTP to 1 mM and taxol to 20 μM and incubation at room temperature for 30 minutes A 3 ml aliquot of the extract is layered on top of 3 ml 15% sucrose cushion prepared in lysis buffer. After centrifuging at 54,000g for 30 minutes at 20° C. using a swing out rotor, the microtubule pellet is resuspended in lysis buffer.

[0421] Microtubule overlay assays are performed as previously described (Saunders et al., 1997). 500 ng per lane of recombinant Asp, recombinant polypeptide, and bovine serum albumin (BSA, Sigma) are fractionated by 10% SDS-PAGE and blotted onto PVDF membranes (Millipore). The membranes are preincubated in TBST (50 mM Tris pH 7.5, 150 mM NaCl, 0.05% Tween 20) containing 5% low fat powdered milk (LFPM) for 1 h and then washed 3 times for 15 minutes in lysis buffer. The filters are then incubated for 30 minutes in lysis buffer containing either 1 mM GDP, 1 mM GTP, or 1 mM GTP-γ-S. MAP-free bovine brain tubulin (Molecular Probes) is polymerised at a concentration of 2 μg/ml in lysis buffer by addition of GTP to a final concentration of 1 mM and incubated at 37° C. for 30 minutes. The nucleotide solutions are removed and the buffer containing polymerised microtubules added to the membanes for incubation for 1 h at 37° C. with addition of taxol at a final concentration of 10 μM for the final 30 minutes. The blots are then washed 3 times with TBST and the bound tubulin detected using standard Western blot procedures using anti-β-tubulin antibodies (Boehringer Mannheim) at 2.5 μg/ml and the Super Signal detection system (Pierce).

[0422] It may be desirable in one embodiment of this type of assay to deplete the polypeptide of interest from cell extracts used to produce polymerise microtubules. This may, for example, be achieved by the use of suitable antibodies.

[0423] A simple extension to this type of assay would be to test the effects of a purified polypeptide upon the ability of tubulin to polymerise in vitro (for example, as used by Andersen and Karsenti, 1997, J. Cell. Biol. 139(4):975-83) in the presence or absence of a candidate substance (typically added at the concentrations described above). Xenopus cell-free extracts may conveniently be used, for example as a source of tubulin.

Microtubule Organising Centre (MTOC) Nucleation Activity Assays

[0424] Candidate substances, for example those identified using the binding assays described above, may be screening using a microtubule organising centre nucleation activity assay to determine if they are capable of disrupting MTOCs as measured by, for example, aster formation. This assay in its simplest form comprises adding the candidate substance to a cellular extract which in the absence of the candidate substance has microtubule organising centre nucleation activity resulting in formation of asters.

[0425] A substance is identified as inhibiting cell cycle progression activity when it is found to inhibit or decrease such activity. In general, a substance which inhibits one or more of these aspects of cell cycle progression either inhibits it completely, or leads to a significant (i.e., greater than 50%) reduction in protein activity at concentrations of 500 mM or less, relative to controls (i.e., substance known to not modulate one or more aspects of cell cycle progression). Preferably, the inhibition is by 75% relative to controls, more preferably by 90%, and most preferably by 95% or 100% relative to controls. The inhibition may prevent cell cycle progression, or may simply delay or prolong cell cycle progression.

[0426] In a preferred embodiment, the assay system comprises (i) a polypeptide of interest and (ii) components required for microtubule organising centre nucleation activity except for functional polypeptide of intereset, which is typically removed by immunodepletion (or by the use of extracts from mutant cells). The components themselves are typically in two parts such that microtubule nucleation does not occur until the two parts are mixed. The polypeptide of interest may be present in one of the two parts initially or added subsequently prior to mixing of the two parts.

[0427] Subsequently, the polypeptide of interest and candidate substance are added to the component mix and microtubule nucleation from centrosomes measured, for example by immunostaining for the polypeptide of interest and visualising aster formation by immuno-fluorescence microscopy. The polypeptide of interest may be preincubated with the candidate substance before addition to the component mix. Alternatively, both the polypeptide of interest and the candidate substance may be added directly to the component mix, simultaneously or sequentially in either order.

[0428] The components required for microtubule organising centre formation typically include salt-stripped centrosomes prepared as described in Moritz et al., 1998, J. Cell Biol. 142(3):775-86). Stripping centrosome preparations with 2M KI removes the centrosome proteins CP60, CP190, CNN and γ-tubulin. Of these, neither CP60 nor CP190 appear to be required for microtubule nucleation. The other minimal components are typically provided as a depleted cellular extract, or conveniently, as a cellular extract from cells with a non-functional variant of a polypeptide of interest. Typically, labeled tubulin (usually β-tubulin) is also added to assist in visualising aster formation.

[0429] Alternatively, partially purified centrosomes that have not been salt-stripped may be used as part of the components. In this case, only tubulin, preferably labeled tubulin is required to complete the component mix.

[0430] Candidate substances are typically added to a final concentration of from 1 to 1000 nmol/ml, more preferably from 1 to 100 nmol/ml. In the case of antibodies, the final concentration used is typically from 100 to 500 μg/ml, more preferably from 200 to 300 μg/ml.

[0431] The degree of inhibition of aster formation by the candidate substance may be determined by measuring the number of normal asters per unit area for control untreated cell preparation and measuring the number of normal asters per unit area for cells treated with the candidate substance and comparing the result. Typically, a candidate substance is considered to be capable of disrupting MTOC integrity if the treated cell preparations have less than 50%, preferably less than 40, 30, 20 or 10% of the number of asters found in untreated cells preparations. It may also be desirable to stain cells for γ-tubulin to determine the maximum number of possible MTOCs present to allow normalisation between samples.

[0432] Motor Protein Assay

[0433] Polypeptides of interest may interact with motor proteins such as the Eg5-like motor protein in vitro. The effects of candidate substances on such a process may be determined using assays wherein the motor protein is inmobilised on coverslips. Rhodamine labeled microtubules are then added and their translocation can be followed by fluorescent microscopy. The effect of candidate substances may thus be determined by comparing the extent and/or rate of translocation in the presence and absence of the candidate substance. Generally, candidate substances known to bind to a polypeptide of interest, would be tested in this assay. Alternatively, a high throughput assay may be used to identify modulators of motor proteins and the resulting identified substances tested for affects on a polypeptide of interest as described above.

[0434] Typically this assay uses microtubules stabilised by taxol (e.g., Howard and Hyman 1993, Chandra and Endow, 1993—both chapters in “Motility Assays for Motor Proteins” Ed. Jon Scholey, pub. Academic Press). If however, a polypeptide of interest were to promote stable polymerisation of microtubules (see above) then these microtubules could be used directly in motility assays.

[0435] Simple protein-protein binding assays as described above, using a motor protein and a polypeptide of interest may also be used to confirm that the polypeptide of the invention binds to the motor protein, typically prior to testing the effect of candidate substances on that interaction.

[0436] The binding of the substance to the cell cycle progression polypeptide can be transient, reversible or permanent. Preferably the substance binds to the polypeptide with a Kd value which is lower than the Kd value for binding to control polypeptides (i.e., polypeptides known to not be cell cycle progression polypeptides). Preferably the Kd value of the substance is 2 fold less than the Kd value for binding to control polypeptides, more preferably with a Kd value 100 fold less, and most preferably with a Kd 1000 fold less than that for binding to the control polypeptide.

[0437] Assay for Spindle Assembly and Function

[0438] A further assay to investigate the function of a polypeptide of interest and the effect of candidate substances on those functions is an assay which measures spindle assembly and function. Typically, such assays are performed using Xenopus cell free systems, where two types of spindle assembly are possible. In the “half spindle” assembly pathway, a cytoplasmic extract of CSF arrested oocytes is mixed with sperm chromatin. The half spindles that form subsequently fuse together. A more physiological method is to induce CSF arrested extracts to enter interphase by addition of calcium, whereupon the DNA replicates and kinetochores form. Addition of fresh CSF arrested extract then induces mitosis with centrosome duplication and spindle formation (for discussion of these systems see Tournebize and Heald, 1996, Nature 382(6590):420-5).

[0439] Again, generally, candidate substances known to bind to a polypeptide of the invention, or non-functional polypeptide variants of the invention, would be tested in this assay. Alternatively, a high throughput assay may be used to identify modulators of spindle formation and function and the resulting identified substances tested for affects binding of the polypeptide of interest as described above.

[0440] The binding of the substance to the cell cycle progression polypeptide can be transient, reversible or permanent. Preferably the substance binds to the polypeptide with a Kd value which is lower than the Kd value for binding to control polypeptides (i.e., polypeptides known to not be cell cycle progression polypeptides). Preferably the Kd value of the substance is 2 fold less than the Kd value for binding to control polypeptides, more preferably with a Kd value 100 fold less, and most preferably with a Kd 1000 fold less than that for binding to the control polypeptide.

[0441] Assays for DNA Replication

[0442] Another assay to investigate the function of a polypeptide of interest and the effect of candidate substances on those functions is as assay for replication of DNA. A number of cell free systems have been developed to assay DNA replication. These can be used to assay the ability of a substance to prevent or inhibit DNA replication, by conducting the assay in the presence of the substance. Suitable cell-free assay systems include, for example the SV-40 assay (Li and Kelly, 1984, Proc. Natl. Acad. Sci USA 81:6973-6977; Waga and Stillman, 1994, Nature 369:207-212). A Drosophila cell free replication system, for example as described by Crevel and Cotteril, 1991, EMBO J. 10:4361-4369, may also be used. A preferred assay is a cell free assay derived from Xenopus egg low speed supernatant extracts described in Blow and Laskey (1986, Cell 47:577-587) and Sheehan et al. (1988, J. Cell Biol. 106:1-12), which measures the incorporation of nucleotides into a substrate consisting of Xenopus sperm DNA or HeLa nuclei. The nucleotides may be radiolabelled and incorporation assayed by scintillation counting. Alternatively and preferably, bromo-deoxy-uridine (BrdU) is used as a nucleotide substitute and replication activity measured by density substitution. The latter assay is able to distinguish genuine replication initiation events from incorporation as a result of DNA repair. The human cell-free replication assay reported by Krude et al., 1997, Cell 88:109-19 may also be used to assay the effects of substances on the polypeptides of interest.

[0443] A substance is identified as inhibiting cell cycle progression activity when it is found to inhibit or decrease such activity. In general, a substance which inhibits one or more of these aspects of cell cycle progression either inhibits it completely, or leads to a significant (i.e., greater than 50%) reduction in protein activity at concentrations of 50 mM or less, relative to controls (i.e., substance known to not modulate one or more aspects of cell cycle progression). Preferably, the inhibition is by 75% relative to controls, more preferably by 90%, and most preferably by 95% or 100% relative to controls. The inhibition may prevent cell cycle progression, or may simply delay or prolong cell cycle progression.

[0444] Other In vitro Assays

[0445] Other assays for identifying substances that bind to a polypeptide of interest are also provided. For example, substances which affect chromosome condensation may be assayed using the in vitro cell free system derived from Xenopus eggs, as known in the art.

[0446] The binding of the substance to the cell cycle progression polypeptide can be transient, reversible or permanent. Preferably the substance binds to the polypeptide with a Kd value which is lower than the Kd value for binding to control polypeptides (i.e., polypeptides known to not be cell cycle progression polypeptides). Preferably the Kd value of the substance is 2 fold less than the Kd value for binding to control polypeptides, more preferably with a Kd value 100 fold less, and most preferably with a Kd 1000 fold less than that for binding to the control polypeptide.

[0447] Substances which affect kinase activity or proteolysis activity are of interest. It is known, for example, that temporal control of ubiquitin-proteasome mediated protein degradation is critical for normal G1 and S phase progression (reviewed in Krek, 1998, Curr Opin Genet Dev 8:36-42). A number of E3 ubiquitin protein ligases, designated SCFs (Skpl-cullin-F-box protein ligase complexes), confer substrate specificity on ubiquitination reactions, while protein kinases phosphorylate substrates destined for destruction and convert them into preferred targets for ubiquitin modification catalyzed by SCFs. Furthermore, ubiquitin-mediated proteolysis due to the anaphase-promoting complex/cyclosome (APC/C) is essential for separation of sister chromatids during mitosis, and exit from mitosis (Listovsky et al., 2000, Exp Cell Res 255:184-191).

[0448] Substances which inhibit or affect kinase activity may be identified by means of a kinase assay as known in the art, for example, by measuring incorporation of ³²P into a suitable peptide or other substrate in the presence of the candidate substance. Similarly, substances which inhibit or affect proteolytic activity may be assayed by detecting increased or decreased cleavage of suitable polypeptide substrates. Assays for these and other protein or polypeptide activities are known to those skilled in the art, and may suitably be used to identify substances which bind to a polypeptide of interest and affect its activity.

[0449] Whole Cell Assays

[0450] Candidate substances may also be tested on whole cells for their effect on cell cycle progression, including mitosis and/or meiosis. Preferably the candidate substances have been identified by the above-described in vitro methods. Alternatively, rapid throughput screens for substances capable of inhibiting cell division, typically mitosis, may be used as a preliminary screen and then used in the in vitro assay described above to confirm that the affect is on a particular polypeptide of interest.

[0451] The candidate substance, i.e., the test compound, may be administered to the cell in several ways. For example, it may be added directly to the cell culture medium or injected into the cell. Alternatively, in the case of polypeptide candidate substances, the cell may be transfected with a nucleic acid construct which directs expression of the polypeptide in the cell. Preferably, the expression of the polypeptide is under the control of a regulatable promoter.

[0452] Typically, an assay to determine the effect of a candidate substance identified by the method of the invention on a particular stage of the cell division cycle comprises administering the candidate substance to a cell and determining whether the substance inhibits that stage of the cell division cycle. Techniques for measuring progress through the cell cycle in a cell population are well known in the art. The extent of progress through the cell cycle in treated cells is compared with the extent of progress through the cell cycle in an untreated control cell population to determine the degree of inhibition, if any. For example, an inhibitor of mitosis or meiosis may be assayed by measuring the proportion of cells in a population which are unable to undergo mitosis/meiosis and comparing this to the proportion of cells in an untreated population.

[0453] The concentration of candidate substances used will typically be such that the final concentration in the cells is similar to that described above for the in vitro assays.

[0454] A candidate substance is typically considered to be an inhibitor of a particular stage in the cell division cycle (for example, mitosis) if the proportion of cells undergoing that particular stage (i.e., mitosis) is reduced to below 50%, preferably below 40, 30, 20 or 10% of that observed in untreated control cell populations.

[0455] Suitably a polypeptide of interest in the context of the above assays is a polypeptide encoded by any nucleic acid sequence identified in Table 1.

Therapeutic Uses

[0456] Many tumours are associated with defects in cell cycle progression, for example loss of normal cell cycle control. Tumour cells may therefore exhibit rapid and often aberrant mitosis. One therapeutic approach to treating cancer is therefore to inhibit mitosis in rapidly dividing cells. Such an approach may also be used for therapy of any proliferative disease in general. In general, a proliferative disease is defined as being “treated” if the cell proliferation associated with the disease or condition is significantly inhibited (i.e., by 50% or more) relative to controls. Preferably, the inhibition is by 75% relative to controls, more preferably by 90%, and most preferably by 95% or 100% relative to controls. The inhibition may prevent cell proliferation, may simply delay or prolong proliferation.

[0457] Thus, since the polypeptides of the invention appear to be required for normal cell cycle progression, they represent targets for inhibition of their functions, particularly in tumour cells and other proliferative cells. Another therapeutic approach to treating cancer may be an anti-angiogenic approach in which angiogenesis is targeted and thus growth of tumour blood vessels inhibited thereby depriving a tumour of blood supply.

[0458] The term proliferative disorder is used herein in a broad sense to include any disorder that requires control of the cell cycle, for example, cardiovascular disorders such as restenosis and cardiomyopathy, auto-immune disorders such as glomerulonephritis and rheumatoid arthritis, dermatological disorders such as psoriasis, anti-inflammatory, anti-fungal, antiparasitic disorders such as malaria, emphysema and alopecia.

[0459] Proliferative disorders also include malignant and pre-neoplastic disorders. The present invention is especially useful in relation to treatment or diagnosis of adenocarcinomas such as: small cell lung cancer, and cancer of the kidney, uterus, prostrate, bladder, ovary, colon and breast. For example, malignancies which may be treatable according to the present invention include acute and chronic leukemias, lymphomas, myelomas, sarcomas such as Fibrosarcoma, myxosarcoma, liposarcoma, lymphangioendotheliosarcoma, angiosarcoma, endotheliosarcoma, chondrosarcoma, osteogenic sarcoma, chordoma, lymphangiosarcoma, synovioma, mesothelioma, leimyosarcoma, rhabdomyosarcoma, colon carcinoma, ovarian cancer, prostate cancer, pancreatic cancer, breast cancer, squamous cell carcinoma, basal cell carcinoma, adenocarcinoma, sweat gland carcinoma, sebaceous gland carcinoma, papillary carcinoma, papillary adenocarcinomas, cystadenocarcinoma, medullary carcinoma, bronchogenic carcinoma, choriocarcinoma, renal cell carcinoma, hepatoma, bile duct carcinoma seminoma, embryonal carcinoma, cervical cancer, testicular tumour, lung carcinoma, small cell lung carcinoma, bladder carcinoma, epithelial carcinoma, glioma, astrocytoma, ependymoma, pinealoma, hemangioblastoma, acoustic neuoma, medulloblastoma, craniopharyngioma, oligodendroglioma, menangioma, melanoma, neutroblastoma and retinoblastoma.

[0460] One possible approach is to express anti-sense constructs directed against polynucleotides of the invention, preferably selectively in tumour cells, to inhibit gene function and prevent the tumour cell from progressing through the cell cycle. Anti-sense constructs may also be used to inhibit gene function to prevent cell cycle progression in a proliferative cell. Another approach is to use non-functional variants of polypeptides of the invention that compete with the endogenous gene product for cellular components of cell cycle machinery, resulting in inhibition of function. Alternatively, compounds identified by the assays described above as binding to a polypeptide of the invention may be administered to tumour or proliferative cells to prevent the function of that polypeptide. This may be performed, for example, by means of gene therapy or by direct administration of the compounds. Suitable antibodies of the invention may also be used as therapeutic agents.

[0461] Alternatively, double-stranded (ds) RNA is a powerful way of interfering with gene expression in a range of organisms that has recently been shown to be successful in mammals (Wianny and Zemicka-Goetz, 2000, Nat Cell Biol 2:70-75). Double stranded RNA corresponding to the sequence of a polynucleotide according to the invention can be introduced into or expressed in oocytes and cells of a candidate organism to interfere with cell division cycle progression.

[0462] In addition, a number of the mutations described herein exhibit aberrant meiotic phenotypes. Aberrant meiosis is an important factor in infertility since mutations that affect only meiosis and not mitosis will lead to a viable organism but one that is unable to produce viable gametes and hence reproduce. Consequently, the elucidation of genes involved in meiosis is an important step in diagnosing and preventing/treating fertility problems. Thus the polypeptides of the invention identified in mutant Drosophila having meiotic defects (as is clearly indicated in the Examples) may be used in methods of identifying substances that affect meiosis. In addition, these polypeptides, and corresponding polynucleotides, may be used to study meiosis and identify possible mutations that are indicative of infertility. This will be of use in diagnosing infertility problems.

Administration

[0463] Substances identified or identifiable by the assay methods of the invention may preferably be combined with various components to produce compositions of the invention. Preferably the compositions are combined with a pharmaceutically acceptable carrier or diluent to produce a pharmaceutical composition (which may be for human or animal use). Suitable carriers and diluents include isotonic saline solutions, for example phosphate-buffered saline. The composition of the invention may be administered by direct injection. The composition may be formulated for parenteral, intramuscular, intravenous, subcutaneous, intraocular or transdermal administration. Typically, each protein may be administered at a dose of from 0.01 to 30 mg/kg body weight, preferably from 0.1 to 10 mg/kg, more preferably from 0.1 to 1 mg/kg body weight.

[0464] Polynucleotides/vectors encoding polypeptide components (or antisense constructs) for use in inhibiting cell cycle progression, for example, inhibiting mitosis or meiosis, may be administered directly as a naked nucleic acid construct. They may further comprise flanking sequences homologous to the host cell genome. When the polynucleotides/vectors are administered as a naked nucleic acid, the amount of nucleic acid administered may typically be in the range of from 1 μg to 10 mg, preferably from 100 μg to 1 mg. It is particularly preferred to use polynucleotides/vectors that target specifically tumour or proliferative cells, for example by virtue of suitable regulatory constructs or by the use of targeted viral vectors.

[0465] Uptake of naked nucleic acid constructs by mammalian cells is enhanced by several known transfection techniques for example those including the use of transfection agents. Example of these agents include cationic agents (for example calcium phosphate and DEAE-dextran) and lipofectants (for example lipofectam™ and transfectam™). Typically, nucleic acid constructs are mixed with the transfection agent to produce a composition.

[0466] Preferably the polynucleotide, polypeptide, compound or vector described here may be conjugated, joined, linked, fused, or otherwise associated with a membrane translocation sequence.

[0467] Preferably, the polynucleotide, polypeptide, compound or vector, etc described here may be delivered into cells by being conjugated with, joined to, linked to, fused to, or otherwise associated with a protein capable of crossing the plasma membrane and/or the nuclear membrane (i.e., a membrane translocation sequence). Preferably, the substance of interest is fused or conjugated to a domain or sequence from such a protein responsible for the translocational activity. Translocation domains and sequences for example include domains and sequences from the HIV-1-trans-activating protein (Tat), Drosophila Antennapedia homeodomain protein and the herpes simplex-1 virus VP22 protein. In a highly preferred embodiment, the substance of interest is conjugated with penetratin protein or a fragment of this. Penetratin comprises the sequence RQIKIWFQNRRMKWKK and is described in Derossi et al., 1994, J. Biol. Chem. 269:10444-50; use of penetratin-drug conjugates for intracellular delivery is described in WO 00/01417. Truncated and modified forms of penetratin may also be used, as described in WO 00/2927.

[0468] Preferably the polynucleotide, polypeptide, compound or vector according to the invention is combined with a pharmaceutically acceptable carrier or diluent to produce a pharmaceutical composition. Suitable carriers and diluents include isotonic saline solutions, for example phosphate-buffered saline. The composition may be formulated for parenteral, intramuscular, intravenous, subcutaneous, intraocular or transdermal administration.

[0469] Use of timed release or sustained release delivery systems are also included in the invention. Such systems are highly desirable in situations where surgery is difficult or impossible, e.g., patients debilitated by age or the disease course itself, or where the risk-benefit analysis dictates control over cure.

[0470] A sustained-release matrix, as used herein, is a matrix made of materials, usually polymers, which are degradable by enzymatic or acid/base hydrolysis or by dissolution. Once inserted into the body, the matrix is acted upon by enzymes and body fluids. The sustained-release matrix desirably is chosen from biocompatible materials.

[0471] The routes of administration and dosages described are intended only as a guide since a skilled practitioner will be able to determine readily the optimum route of administration and dosage for any particular patient and condition.

[0472] The invention will now be further described by way of Examples, which are meant to serve to assist one of ordinary skill in the art in carrying out the invention and are not intended in any way to limit the scope of the invention.

### EXAMPLES

Introduction

[0473] In order to identify new human cell cycle regulatory genes, candidate genes were identified by establishing the role of their Drosophila counterparts in cell cycle progression through an RNAi-based knockdown approach in cultured Drosophila cells followed by mitotic index evaluation (Cellomics Arrayscan) and confirming the role of the human gene through RNAi in human cells followed by FACS analysis and microscopy.

[0474] A list of Human cell cycle progression genes and their Drosophila counterparts for which data is described is presented in Table 1. Multiple protein sequence gi numbers are listed where alternative transcripts or splice variants for a Drosophila gene are listed in the data base, These Human and Drosophila genes and proteins are useful, for example, for screening for anti-proliferative molecules.

[0475] The homologies (Drosophila and human) are clustered homologies within a region of the gene and do not relate to comparison of the whole human gene with the whole Drosophila gene. The similarities quoted relate to the region of greatest homology for that gene. The score also indicates confidence in homology, with higher scores indicating higher confidence. The score relates not only to the percentage similarity, but also to the length of sequence over which the similarity extends.

[0476] The homologues are identified by performing a BLAST search and identifying the human protein with the best homology, i.e., the one nearest the top of the search results list, where genes are ranked in descending order according to the likelihood of a match not being due to chance. In some cases, there are other sections of the Drosophila and human genes with homology.

TABLE 1

| Drosophila Gene | | | | | | |
|---|---|---|---|---|---|---|
| | | Protein | Human homologue(s) | | | |
| | Nucleotide | sequence | | SWISS- | | |
| | sequence | gi | | PROT | BLAST results | |
| Gene Name | gi numbers | numbers | Gene Name | reference | Similarity | Score |
| CG3632 | 10728281 | 7293200 | Similar to myotubularin related protein 3. | Q9UEG3 | 365/575 | 546 |
| | | 7293201 | Hypothetical FYVE domain-containing dual | | (62%) | |
| | | 7293199 | specificity protein phosphatase FYVE- | | | |
| | | 7293198 | DSP1C. | | | |
| Pp1-87B | 7299572 | 7299625 | Serine/threonine protein phosphatase PP1- | P36873 | 289/299 | 590 |
| | | | gamma catalytic subunit (EC 3.1.3.16) (PP- | | (96%) | |
| | | | 1G). | | | |
| CG3524 | 10727365 | 7295849 | Fatty acid synthase (EC 2.3.1.85). | Q16702 | 748/1174 | 1011 |
| | | | | | (62%) | |
| CG9311 | 10727923 | 7294357 | Protein tyrosine phosphatase HD-PTP | Q9H3S7 | 423/738 | 480 |
| | | | (Protein tyrosine phosphatase TD14). | | (56%) | |
| CG9092 | 7297037 | 7297052 | Beta-galactosidase precursor (EC 3.2.1.23) | P16278 | 364/672 | 402 |
| | | | (Lactase) (Acid beta-galactosidase). | | (53%) | |
| Arr1 | 10728850 | 7298421 | Beta-Arrestin 1. A regulator of GPCR | P49407 | 228/356 | 306 |
| | | | activity | | (63%) | |
| CG9150 | 7297037 | 7297069 | Hypothetical protein with putative | Q9BUC7 | 101/176 | 115 |
| | | | dehydrogenase/reductase domains | | (56%) | |
| CG11102 | 10728232 | 7292929 | KIAA0659 protein (Fragment). | BAA31634 | 330/562 | 422 |
| | | | | | (58%) | |
| Smr | 7292788 | 7292802 | Nuclear receptor co-repressor 1 (NCR-1). | O75376 | 206/379 | 226 |
| | | | | | (53%) | |
| CG8045 | 7300335 | 7300358 | 14-3-3 protein epsilon (Mitochondrial import | P42655 | 237/258 | 424 |
| | | 7300360 | stimulation factor L subunit) (Protein kinase C | | (91%) | |
| | | 7300364 | inhibitor protein-1) (KCIP-1) (14-3-3E). | | | |
| CG10420 | 7301280 | 7301293 | SIL1 protein precursor (Endoplasmic | Q9H173 | 159/318 | 135 |
| | | | reticulum chaperone SIL1, homolog of yeast). | | (49%) | |
| Hsc70-2 | 10726497 | 7299717 | Heat shock cognate 71 kDa protein. | P11142 | 507/606 | 879 |
| | | | | | (82%) | |
| CG10805 | 7297167 | 7297181 | Protein BAP28. | Q9H583 | 629/1324 | 465 |
| | | | | | (47%) | |
| eIF-4a | 7297037 | 7297048 | Similar to eukaryotic translation initiation | Q96EA8 | 342/402 | 576 |
| | | | factor 4A2 | | (84%) | |
| ACXA | 7297983 | 10728753 | CYA2 Adenylate cyclase, type II (EC 4.6.1.1) | Q08462 | 420/931 | 306 |
| | | | (ATP pyrophosphate-lyase) (Adenylyl | | (44%) | |
| | | | cyclase) (Fragment). | | | |
| | | | CYA8 Adenylate cyclase, type VIII (EC | P40145 | 446/1037 | 296 |
| | | | 4.6.1.1) (ATP pyrophosphate-lyase) | | (42%) | |
| | | | (Ca(2+)/calmodulin activated adenylyl | | | |
| | | | cyclase). | | | |
| CG15117 | 10727456 | 7302519 | Beta-glucuronidase precursor (EC 3.2.1.31) | P08236 | 357/638 | 431 |
| | | | (Beta-G1). | | (55%) | |
| BG:DS01759.2 | 7298121 | 7298138 | No human homologue | | | |
| TepIII | 7297264 | 7297279 | Cell surface antigen CD109. | Q8TDJ3 | 686/1478 | 500 |
| | | | | | (46%) | |
| Hsc70-4 | 10726541 | 7299978 | HS7C Heat shock cognate 71 kDa protein. | P11142 | 539/612 | 994 |
| | | | | | (87%) | |
| CG7069 | 10726692 | 10726696 | Pyruvate kinase, M2 isozyme (EC 2.7.1.40). | P14786 | 280/412 | 400 |
| | | | | | (67%) | |
| ACXE | 7297983 | 7297987 | CYA8 Adenylate cyclase, type VIII (EC | P40145 | 454/968 | 331 |
| | | | 4.6.1.1) (ATP pyrophosphate-lyase) | | (46%) | |
| | | | (Ca(2+)/calmodulin activated adenylyl | | | |
| | | | cyclase). | | | |
| | | | CYA7 Adenylate cyclase, type VII (EC | P51828 | 211/397 | 212 |
| | | | 4.6.1.1) (ATP pyrophosphate-lyase) | | (52%) | |
| | | | (Adenylyl cyclase). | | | |
| EG:52C10.5 | 10727480 | 7302711 | FYVE finger-containing phosphoinositide | Q9Y217 | 193/348 | 253 |
| | | | kinase (EC 2.7.1.68) (1-phosphatidylinositol- | | (54%) | |
| | | | 4-phosphate kinase) (PIP5K) (PtdIns(4)P-5- | | | |
| | | | kinase) (p235) (Fragment). | | | |
| gatA | 10726610 | 7300468 | Hypothetical protein | Q9H0R6 | 320/507 | 465 |
| | | | | | (62%) | |
| CG17149 | 10727803 | 7293682 | DJ184J9.1 (Hypothetical protein KIAA0601) | Q9NUH3 | 552/856 | 793 |
| | | 7293681 | (Fragment) | | (63%) | |
| CG2905 | 10728163 | 7302249 | TRRAP protein/PI3 PI4 kinase, a novel ATM- | Q9Y6H4 | 2393/3582 | 3391 |
| | | | related protein. | | (65%) | |
| CG2336 | 10727121 | 7298905 | No human homologue | | | |
| TER94 | 10727672 | 7303816 | Transitional endoplasmic reticulum ATPase | P55072 | 692/803 | 1248 |
| | | 7303817 | (TER ATPase) (15S Mg(2+)- ATPase p97 | | (86%) | |
| | | | subunit) (Valosin containing protein) (VCP) | | | |
| | | | [Contains: Valosin]. | | | |
| CG6313 | 10726739 | 7301133 | KIAA0697 protein (Fragment). | BAA31672 | 451/575 | 737 |
| | | | | | (78%) | |
| aur | 10726473 | 7299536 | AURORA-related kinase 1 (DJ1167H4.2) | O60445 | 207/262 | 346 |
| | | | (Serine/threonine kinase 15). | | (78%) | |
| | | | AURORA-related kinase 2 (Serine/threonine | O60446 | 205/261 | 337 |
| | | | kinase 12). | | (78%) | |
| Pk91C | 10799498 | 7300437 | hypothetical protein FLJ14813 | Q96SJ5 | | |
| Top2 | 10728874 | 7298585 | DNA topoisomerase II, alpha isozyme (EC | P11388 | 651/898 | 1026 |
| | | | 5.99.1.3). | | (71%) | |
| | | | DNA topoisomerase II, beta isozyme (EC | Q02880 | 903/1200 | 1470 |
| | | | 5.99.1.3). | | (74%) | |
| alpha-Est1 | 10727101 | 10727102 | Acetylcholinesterase precursor (EC 3.1.1.7) | P22303 | 251/542 | 208 |
| | | | (AChE). | | (45%) | |
| Nrk | 10727582 | 7303361 | Muscle specific tyrosine kinase receptor. | O15146 | 228/303 | 378 |
| | | | | | (74%) | |
| otk | 10727617 | 7303541 | PTK7 Tyrosine-protein kinase-like 7 | Q13308 | 156/245 | 208 |
| | | | precursor (Colon carcinoma kinase-4) (CCK- | | (63%) | |
| | | | 4). | | | |
| cad | 10799497 | 7298711 | Homeobox protein CDX-2 (Caudal-type | Q99626 | 67/81 | 123 |
| | | | homeobox protein 2) (CDX-3). | | (82%) | |
| Rut | 10728252 | 7293001 | CYA6 Adenylate cyclase, type VI (EC | O43306 | 293/441 | 405 |
| | | | 4.6.1.1) (ATP pyrophosphate-lyase) (Ca(2+)- | | (66%) | |
| | | | inhibitable adenylyl cyclase). | | | |
| CG8002 | 10728334 | 7293569 | KIAA1999 protein (Fragment). | BAC02708 | 270/526 | 260 |
| | | | | | (51%) | |
| CG10335 | 10727968 | 7294597 | HEM2 Delta-aminolevulinic acid dehydratase | P13716 | 243/318 | 392 |
| | | | (EC 4.2.1.24) (Porphobilinogen synthase) | | (75%) | |
| | | | (ALADH). | | | |
| CG8070 | 10727693 | 7303942 | Hypothetical protein FLJ10498 | Q9NVU7 | 301/458 | 447 |
| | | | | | (65%) | |
| CG7460 | 10727853 | 7293951 | Polyamine oxidase isoform-1. | Q96QT3 | 209/521 | 137 |
| | | | | | (39%) | |
| CG17735 | 10727172 | 7296816 | Thyroid receptor interacting protein 12 | Q14669 | 438/663 | 652 |
| | | | (TRIP12). | | (65%) | |
| Gycalpha99B | 7301790 | 7301807 | CYG4 Guanylate cyclase soluble, alpha-2 | P33402 | 363/670 | 394 |
| | | | chain (EC 4.6.1.2) (GCS-alpha-2). | | (54%) | |
| CG13893 | 7291959 | 7291980 | SEC14-like protein 2 (Alpha-tocopherol | O76054 | 179/316 | 194 |
| | | | associated protein) (TAP) (hTAP) | | (56%) | |
| | | | (Supernatant protein factor) (SPF) (Squalene | | | |
| | | | transfer protein). | | | |
| CG18176 | 10728019 | 7294884 | DKFZP434B168 protein. | AAH33918 | 517/994 | 502 |
| | | | | | (51%) | |
| CG8858 | 10727617 | 7303499 | Hypothetical protein KIAA0368 (Fragment). | O15074 | 752/1552 | 607 |
| | | | | | (47%) | |
| Ac76E | 10733346 | 10733351 | CYA2 Adenylate cyclase, type II (EC 4.6.1.1) | Q08462 | 194/267 | 294 |
| | | | (ATP pyrophosphate-lyase) (Adenylyl | | (71%) | |
| | | | cyclase) (Fragment). | | | |
| | | | Adenylate cyclase, type VII (EC 4.6.1.1) | P51828 | 257/463 | 291 |
| | | | (ATP pyrophosphate-lyase) (Adenylyl | | (55%) | |
| | | | cyclase). | | | |
| CG17010 | 7297915 | 7297937 | Ribokinase (EC 2.7.1.15). | Q9H477 | 155/270 | 164 |
| | | | | | (57%) | |
| Tkv | 7296952 | 22945650 | Bone morphogenetic protein receptor type IB | O00238 | 313/489 | 460 |
| | | | precursor (EC 2.7.1.37). | | (63%) | |
| | | | Bone morphogenetic protein receptor type IA | P36894 | 307/490 | 454 |
| | | | precursor (EC 2.7.1.37) (Serine/threonine- | | (62%) | |
| | | | protein kinase receptor R5) (SKR5) (Activin | | | |
| | | | receptor-like kinase 3) (ALK-3). | | | |
| | | | Activin receptor type I precursor (EC | Q04771 | 309/521 | 394 |
| | | | 2.7.1.37) (ACTR-I) (Serine/threonine-protein | | (59%) | |
| | | | kinase receptor R1) (SKR1) (Activin receptor- | | | |
| | | | like kinase 2) (ALK-2) (TGF-B superfamily | | | |
| | | | receptor type I) (TSR-I). | | | |
| Dnt | 10728868 | 7298565 | Tyrosine-protein kinase RYK precursor (EC | P34925 | 305/558 | 343 |
| | | | 2.7.1.112). | | (54%) | |
| ACXD | 10727242 | 7292211 | CYA2 Adenylate cyclase, type II (EC 4.6.1.1) | Q08462 | 444/976 | 333 |
| | | | (ATP pyrophosphate-lyase) (Adenylyl | | (45%) | |
| | | | cyclase) (Fragment). | | | |
| | | | CYA8 Adenylate cyclase, type VIII (EC | P40145 | 423/897 | 320 |
| | | | 4.6.1.1) (ATP pyrophosphate-lyase) | | (46%) | |
| | | | (Ca(2+)/calmodulin activated adenylyl | | | |
| | | | cyclase). | | | |
| Aats-ala-m | 10728137 | 7295490 | Alanyl-tRNA synthetase (EC 6.1.1.7) | P49588 | 511/1047 | 489 |
| | | | (Alanine-tRNA ligase) (AlaRS). | | (48%) | |
| Gek | 7291737 | 7291742 | CDC42-binding protein kinase beta. | Q9Y5S2 | 977/1678 | 1155 |
| | | | | | (57%) | |
| CG3216 | 10726992 | 7291217 | Atrial natriuretic peptide receptor A precursor | P16066 | 588/1046 | 682 |
| | | | (ANP-A) (ANPRA) (GC-A) (Guanylate | | (55%) | |
| | | | cyclase) (EC 4.6.1.2) (NPR-A) (Atrial | | | |
| | | | natriuretic peptide A-type receptor). | | | |
| | | | Atrial natriuretic peptide receptor B precursor | P20594 | 146/224 | 187 |
| | | | (ANP-B) (ANPRB) (GC-B) (Guanylate | | (64%) | |
| | | | cyclase) (EC 4.6.1.2) (NPR-B) (Atrial | | | |
| | | | natriuretic peptide B-type receptor). | | | |
| CG5653 | 10728037 | 7295017 | Polyamine oxidase isoform-1. | Q96QT3 | 105/234 | 99 |
| | | | | | (44%) | |
| CG17740 | 10727606 | 21627360 | VSGP/F (vascular smooth muscle cell growth | Q9HCB6 | 261/527 | 259 |
| | | | promoting factor)-spondin. | | (49%) | |
| Tepl | 7298255 | 10728811 | Cell surface antigen CD109. | Q8TDJ3 | 644/1355 | 497 |
| | | | | | (46%) | |
| for | 10727349 | 10727350 | cGMP-dependent protein kinase 1, alpha | Q13976 | 518/706 | 827 |
| | | 10727351 | isozyme (EC 2.7.1.37) (CGK 1 alpha) (cGKI- | | (73%) | |
| | | 10727352 | alpha). Exhibits a substrate specificity similar | | | |
| | | 10727353 | but not identical to CAK | | | |
| | | 10727354 | | | | |
| Ac13E | 10728265 | 7293083 | Adenylate cyclase, type IX (EC 4.6.1.1) (ATP | O60503 | 286/521 | 351 |
| | | | pyrophosphate-lyase) (Adenylyl cyclase). | | (54%) | |
| | | | Adenylate cyclase type III (EC 4.6.1.1) | O60266 | 174/307 | 208 |
| | | | (Adenylate cyclase, olfactive type) (ATP | | (55%) | |
| | | | pyrophosphate-lyase) (Adenylyl cyclase) (AC- | | | |
| | | | III) (AC3). | | | |
| CG2667 | 7298935 | 7298950 | Diacylglycerol kinase, delta (EC 2.7.1.107) | Q16760 | 327/526 | 421 |
| | | | (Diglyceride kinase) (DGK-delta) (DAG | | (61%) | |
| | | | kinase delta) (130 kDa diacylglycerol kinase) | | | |
| | | | (Fragment). | | | |
| CG7842 | 10727872 | 7294021 | BK1191B2.3.1 (Putative novel acyl | O95510 | 203/310 | 299 |
| | | | transferase similar to C. ELEGANS C50D2.7) | | (65%) | |
| | | | (Isoform 1) (Fragment). | | | |
| CG17486 | 7289853 | 7289856 | Hypothetical protein FLJ20752 | Q9NWL6 | 310/632 | 273 |
| | | | | | (48%) | |
| CG6969 | 10726705 | 7300903 | MYELOBLAST KIAA0230 [Fragment], a | Q92626 | 295/574 | 317 |
| | | | human melanoma associated gene | | (51%) | |
| CG12262 | 10728071 | 7295201 | Acyl-CoA dehydrogenase, medium-chain | P11310 | 337/411 | 587 |
| | | | specific, mitochondrial [Precursor] | | (81%) | |
| Fray | 10726601 | 10726604 | Oxidative-stress responsive 1, a Ser/Thr | O95747 | 338/524 | 513 |
| | | | pkinase | | (63%) | |
| CG6879 | 10726756 | 7301203 | MYELOBLAST KIAA0230 [Fragment], a | Q92626 | 298/594 | 318 |
| | | | human melanoma associated gene | | (49%) | |
| CG11594 | 10727290 | 7292419 | Hypothetical protein with FGGY carbohydrate | Q96C11 | 286/442 | 402 |
| | | | kinase domain | | (64%) | |
| S6kII | 10803726 | 7295638 | Ribosomal protein S6 kinase alpha 3/Insulin- | P51812 | 520/744 | 803 |
| | | | stimulated protein kinase 1 (ISPK-1). | | (69%) | |
| CG11714 | 10727982 | 7294716 | Hypothetical protein | Q9HAB2 | 82/207 | 56 |
| | | | | | (39%) | |
| | | | speckle-type POZ protein [SPOP]/BTB | O43791 | 61/137 | 54 |
| | | | domain protein (Fragment) [BDPL] | | (44%) | |
| CG3534 | 7300193 | 7300206 | Xylulokinase [XYLB] | O75191 | 299/489 | 395 |
| | | | | | (60%) | |
| CG7335 | 10727803 | 7293697 | Ketohexokinase (EC 2.7.1.3) (Hepatic | P50053 | 145/330 | 102 |
| | | | fructokinase) [KHK] | | (43%) | |
| CG11275 | 7291355 | 7291386 | Hypothetical protein | Q9HAB2 | 83/181 | 71 |
| | | | | | (45%) | |
| | | | Speckle-type POZ protein [SPOP]/BTB | O43791 | 58/93 | 60 |
| | | | domain protein (Fragment) [BDPL] | | (61%) | |
| CG16726 | 10728019 | 7294899 | Thyrotropin-releasing hormone receptor | P34981 | 81/166 | 75 |
| | | | (TRH-R) (Thyroliberin receptor) [TRHR]. | | (48%) | |
| CG7514 | 10727313 | 7292529 | Mitochondrial 2-oxoglutarate/malate carrier | Q02978 | 199/296 | 301 |
| | | | protein | | (66%) | |
| CG17283 | 7300241 | 7300253 | Cathepsin E [Precursor] | P14091 | 178/332 | 218 |
| | | | | | (53%) | |
| BcDNA:GH07626 | 10727365 | 7295848 | Fatty acid synthase (EC 2.3.1.85) | Q16702 | 743/1140 | 1077 |
| | | | | | (65%) | |
| CG16752 | 10728478 | 7290587 | Putative G-protein coupled receptor [GPCR] | Q8TDU8 | 66/144 | 49 |
| | | | | | (45%) | |
| Rpt1 | 10727757 | 7304183 | MSS1 protein-26S protease regulatory | P35998 | 391/433 | 743 |
| | | | subunit 7. | | (89%) | |
| Wts | 7301969 | 7301980 | Large tumor suppressor 1 [LATS1] | O95835 | 362/428 | 630 |
| | | | | | (83%) | |
| | | | Large tumor suppressor 2 (Fragment) | Q9P2X1 | 346/414 | 604 |
| | | | [HSLATS2] | | (83%) | |
| CG1582 | 7292554 | 7292573 | Putative DEAH-box RNA/DNA helicase | AAM73547 | 584/866 | 776 |
| | | | | | (66%) | |
| CG12289 | 10727982 | 7294728 | Ketohexokinase (EC 2.7.1.3) (Hepatic | P50053 | 141/300 | 147 |
| | | | fructokinase) [KHK] | | (49%) | |
| Pepck | 10727469 | 7302595 | Phosphoenolpyruvate (EC 4.1.1.32) | Q16822 | 453/616 | 789 |
| | | | carboxykinase, mitochondrial precursor [GTP] | | (73%) | |
| | | | (Phosphoenolpyruvate carboxylase) | | | |
| | | | (PEPCK-M) [PCK2] | | | |
| CG5665 | 10726906 | 7296289 | Lipoprotein lipase precursor (EC 3.1.1.34) | P06858 | 119/259 | 105 |
| | | | (LPL) [LPL] | | (45%) | |
| CG7285 | 10727839 | 7293895 | Somatostatin receptor 2B [SSTR2] | Q96TF2 | 174/335 | 201 |
| | | | | | (51%) | |
| Bt | 10726313 | 10726323 | Titin | Q8WZ42 | 2478/5772 | 1796 |
| | | | | | (42%) | |
| CG8795 | 10726505 | 7299748 | Neuromedin U receptor-type 2 | Q9GZQ4 | 167/302 | 177 |
| | | | G protein-coupled receptor TGR-1 | | (55%) | |
| CG10967 | 10727955 | 7294537 | Serine/threonine-protein kinase ULK1 (EC | O75385 | 255/504 | 327 |
| | | | 2.7.1.—) (Unc-51-like kinase 1) [ULK1] | | (50%) | |
| CG3809 | 10726480 | 7299571 | Adenosine kinase (EC 2.7.1.20) (AK) | P55263 | 203/343 | 251 |
| | | | (Adenosine | | (58%) | |
| | | | 5′-phosphotransferase) [ADK] | | | |
| Ack | 10727290 | 10727294 | Activated p21cdc42 Hs kinase [ACK1] | Q07912 | 309/438 | 489 |
| | | | | | (69%) | |
| AbI | 10727878 | 7294076 | Proto-oncogene tyrosine-protein kinase ABL1 | P00519 | 407/470 | 742 |
| | | | (EC 2.7.1.112) (p150) (c-ABL) [ABL1] | | (86%) | |
| CG7362 | 10726534 | 7299922 | Pyruvate kinase, M2 isozyme (EC 2.7.1.40) | P14786 | 166/273 | 214 |
| | | | [PKM2] | | (59%) | |
| Cyp9f2 | 7299572 | 7299618 | Cytochrome P450 3A4 (EC 1.14.14.1) | P08684 | 282/505 | 270 |
| | | | (CYPIIIA4) (Nifedipine oxidase) (NF-25) | | (55%) | |
| | | | (P450-PCN1) [CYP3A4] | | | |

1) Synthesis of D.MEL-2 Genomic DNA and cDNA
i) Genomic DNA

[0477] D.Mel-2 cells from an established culture were grown in a 500 ml Erlenmeyer flask in Drosophila-SFM/glutamine/Pen-Strep at 28° C. until the culture reached 2×10⁷ cells/ml.

[0478] Cells were pelleted and washed twice with 50 ml PBS, then the pellet resuspended in 1 volume (10 ml) digestion buffer (100 mM NaCl, 10 mM Tris pH8, 25 mM EDTA pH8, 0.5% SDS, 0.1 mg/ml proteinase K) and incubated at 50° C. for 15 hrs (in Hybaid rotisserie). DNA was extracted 3 times with an equal volume of Phenol/Chloroform and twice with an equal volume of Chloroform.

[0479] DNA was then precipitated by adding ½ volume of 7.5M ammonium acetate and 2 volumes of 97% ethanol, incubating at −20° C. for 15 minutes, then centrifuging at 10,000 rpm, 4° C. for 20 minutes. The pellet was washed with 70% ethanol, allowed to dry, then dissolved in 12 ml 10 mM Tris (pH 8.5).

[0480] For sufficient genomic DNA to amplify all the Drosophila genes requiring a genomic DNA template in the PCR reaction, this procedure was repeated a further 7 times, pooling the genomic DNA and the concentration assessed by measuring A260/A280 values.

ii) cDNA

[0481] D.Mel-2 total RNA was prepared as follows:

[0482] Cells were pelleted from 50 ml of a DMEL-2 culture at 5×10⁶ cells/ml and washed twice with 50 ml PBS, then resuspended in 4 ml denaturing solution (4 M guanidine thiocyanate, 25 mM sodium citrate, 0.5% N-laurylsarcosine (Sarkosyl), 0.1M 2-mercaptoethanol) in a corex tube.

[0483] 400 μl 2 M sodium acetate pH 4.0 was added and mixed by inversion before adding 4 ml water-saturated phenol followed by 800 μl 49:1 chloroform/isoamylalcohol, then the suspension incubated on ice for 15 mins. The mixture was then spun in a centrifuge at 10,000 rpm for 30 mins and the aqueous phase transferred to a fresh tube. The RNA was precipitated by adding 4 ml isopropanol and incubating at 20° C. for 20 mins. The RNA was centrifuged at 10,000 rpm for 30 minutes at 4° C. to pellet the RNA and the pellet dissolved in 1200 μl denaturing solution. The RNA was precipitated a second time by adding 1200 μl isopropanol and incubating at −20° C. for 20 mins. The mixture was then centrifuged at 10,000 rpm for 30 minutes at 4° C. to pellet the RNA which was then washed with 1 ml 75% ethanol, incubating at room temperature for 10 mins, then centrifuging at 4° C. for 5 mins. The supernatant was removed and the pellet allowed to dry before resuspending in 800 μl RNase- and DNase-free water. The concentration of the total RNA preparation was assessed from A₂₆₀/A₂₈₀ values.

[0484] D.Mel-2 cDNA was prepared using SuperScript™ First-strand synthesis system for RT-PCR (Invitrogen Ltd, 3 Fountain Drive, Inchinnan Business Park, Paisley PA4 9RF, UK).

[0485] To prepare sufficient cDNA to amplify all the Drosophila genes requiring a cDNA template in the PCR reaction, 96 50 μl cDNA preparations reactions in a 96-well plate were carried out as follows:

[0486] Reaction Mix (1) (800 μg D.MeI-2 RNA, 250 μl 10 mM dNTP mixture, 250 pt 500 μg/ml oligo dT primer, RNase- and DNase-free water to a final volume of 2.6 ml) was prepared and 26 μl was aliquoted into each well of a 96-well plate, then incubated at 65° C. for 5 minutes.

[0487] Reaction Mix (2) was prepared (500 μl 10×RT buffer, 1000 μl 25 mM MgCl₂, 500 μl 0.1 M DTT, 250 μl RNase OUT and 250 μl SuperScript™ II RT) was prewarmed to 42° C. for 2 minutes, then 25 μl added to each well of the 96-well plate containing the 26 μl Reaction Mix (1).

[0488] The plate was heat sealed and incubated at 42° C. for 1 hour, then at 70° C. for 15 minutes on PTC-225 thermocycler (MJ Research, 590 Lincoln Street, Waltham, Mass. 02451-1003, USA). The reactions were placed on ice for 5 minutes, then 2.5 μl RNase H added to each well and incubated at 37° C. for 20 minutes. The reactions were pooled, mixed and stored as 200 μl aliquots at −20° C.

2) Generating Drosophila Gene Specific dsRNA

i) Designing and ordering RNAi primers.

[0489] Primers for the amplification of specific sequences of groups of Drosophila genes to be used as templates for the preparation of dsRNA were designed using PhilaSys primer design program (PhilaSysAmis Software Pvt. Ltd 120-1A Elephant Rock Road, 3 Brock Jaayenagar, Bangalore 560011, India). This program is designed to identify suitable primers for each of the Drosophila genes in the NCBI database, tagging a T7 RNA polymerase binding site sequence (TAATACGACTCACTATAGGGAGA) to the 5′ end of each primer.

[0490] The following parameters were used in the primer design process:
[0491] Length of final PCR product=between 500 to 550 base pairs
[0492] Length of primer=25-35 base pairs
[0493] Primer melting temperature=from 50.0 to 80.0C
[0494] Minimum % GC=35.0
[0495] Maximum permitted length of palindromes=8 base pairs
[0496] Maximum permitted value of free energy of haripin loops=−1.0 kcal/mol
[0497] Minimum permitted value of primer-primer duplex free energy=−15.0 kcal/mol
[0498] Minimum permitted value for primer-primer 3′ end duplex free energy=−3.0 kcal/mol
[0499] Maximum difference in the melting temperatures between primer pairs=5° C.
[0500] Maximum value for the difference in the % GC between the primers=10.0
[0501] Primer concentrations=250 pMol
[0502] Salt concentration=50 mM

[0503] Primer pairs amplifying an intra-exon sequence were tagged as genomic (indicating that genomic DNA could be used in the PCR reaction) while sequences spanning 2 or more exons were tagged as cDNA (indicating a requirement for cDNA template for PCR amplification of the gene specific sequence).

[0504] Where no suitable primer pair for a gene was identified by the primer design program, the parameters were modified and the search process repeated. The minimum parameters settings were as follows:
[0505] Length of the final PCR product=between 150 to 200 base pairs
[0506] Length of the primer=25-35 base pairs
[0507] Primer melting temperature=from 50.0 to 65.0C
[0508] Minimum % GC of the primers=30.0
[0509] Maximum permitted length of palindromes=10 base pairs
[0510] Maximum permitted value of free energy of hairpin loops=−2.5 kcal/mol
[0511] Minimum permitted value of primer-primer duplex free energy=−10.0 kcal/mol
[0512] Minimum permitted value for primer-primer 3′ end duplex free energy=−5.0 kcal/mol
[0513] Maximum difference in the melting temperatures between primer pairs=8° C.
[0514] Maximum value for the difference in the % GC between the primers=15.0
[0515] Primer concentrations=250 pMol
[0516] Salt concentration=50 mM

[0517] Primers (Table 2) were ordered from MWG (MWG Biotech (UK) Ltd, Mill Court, Featherstone Road, Wolverton Mill South, Milton Keynes, MK12 5RD, UK) pre-mixed at a concentration of 50 μM in 96 well Thermosprint plates.

ii) The primers were then used to synthesis Drosophila Gene Specific PCR products for dsRNA production.

[0518] The details of the primers for each plate were imported into the MWG AG Biotech RoboSeq 4204SE samples database.

[0519] The PCR reactions were aliquoted in a 96-well plate format using the RoboSeq 4204SE following the manufacturer's instructions. Each reaction comprised of 3 μl 17 μM gene specific primer pair, 2 μl D.MeI-2 genomic DNA or cDNA (2 μg/ml) as appropriate and 45 μl 1.1× thermo-start PCR master mix with 2.5 mM MgCl₂ (ABgene House, Blenheim Road, Epsom, Surrey KT19 9AP, UK) following the manufacturer's instructions. The RoboSeq 4204SE assigned barcode for each plate was recorded and the plates were stored at −80° C.

[0520] Once the RoboSeq 4204SE completed the PCR reaction set up, the plates were sealed and transferred to the PTC-225 thermocycler, running the programme THERMOPC, with steps 2 and 3 repeated 35 times:
[0521] 1: 95° C. 00:15
[0522] 2: 95° C. 00:30
[0523] 3: 55° C. 00:45
[0524] 4: 72° C. 01:00
[0525] 5: 72° C. 05:00
[0526] 6: 4° C. ∞

[0527] The PCR products were purified using the RoboSeq 4204SE together with Millipore's Montage™ PCR₉₆ Cleanup Kit (Millipore (U.K.) Ltd, Units 3&5, The Courtyards, Hatters Lane, Watford, WD18 8YH, UK).

[0528] The RoboSeq 4204SE assigned barcode for each plate was again recorded and the purified PCR product plates were stored at −20° C.

[0529] Each PCR product plate was thawed and sequences verified by running a sequencing reaction using ordered arrayed sequencing primers corresponding to the forward primers used in the original amplification reactions, but without the 5′ T7 RNA polymerase binding site sequence. Sequencing reactions were performed by Lark Technologies, Inc. (Radwinter Road, Saffron Walden, Essex, CB13HY, UK).

[0530] The resulting sequences were verified to ensure that they corresponded to the sequences of the genes associated with each of the test wells, by BLAST searching the NCBI database.

iii) Gene specific PCR products were used as templates in in vitro transcription reactions to produce gene specific dsRNA.

[0531] Reactions were set up in a 96-well plate format using the RoboSeq 4204SE, with each reaction comprised of 8 μl gene specific PCR product, 6 μl 3.3×T7 RNA polymerase buffer (130.7 mM HEPES (pH 8.1), 16.3 mM DTT, 13.1% PEG 8000, 0.03% Triton X-100, 65.3 mM Mg(OAc)), 4 μl 25 mM rNTP mix, 0.5 μl 50 U/μl yeast inorganic pyrophosphatase, 1 μl 20 U/μl Rnasin, 0.5 μl 80 U/μl T7 RNA polymerase. The reactions were incubated for 4 hours at 37° C. on the PTC-225 thermocycler.

[0532] Transcribed RNA was treated with DNase I (2U/μl) at 37° C. for 15 mins and diluted by the addition of 80 μl RNase-free Milli-Q water again with the aid of the RoboSeq 4204SE. To anneal the RNA, the samples were heated to 95° C. for 10 mins and then cooled slowly to room temperature overnight.

[0533] The RoboSeq 4204SE assigned barcode for each plate was recorded and the dsRNA plates were stored at −20° C.

[0534] iv) Synthesis of control sequences from Red Fluorescent Protein (RFP) (Matz et al., 1999, Nat Biotechnol. 17:969-973), Drosophila orbit and Drosophila polo dsRNA. RFP dsRNA was used as a negative control throughout, due to this gene being absent from D.Mel-2 cells. dsRNAs targeting 2 well established Drosophila cell cycle genes, orbit (Inoue et al., 2000, J. Cell Biol. 149:153-166, Maiato et al., 2002, J. Cell Biol. 157:749-760.) and polo (Sunkel and Glover, 1988, J Cell Sci. 89:25-38, Fenton and Glover, 1993, Nature 363:637-640, Carmena et al., 1998, J. Cell Biol. 143:659-671), were used as positive controls throughout, as experiments had shown that RNAi of orbit or polo gene expression has a significant affect on cell cycle progression (See FIG. 181 of FACS profiles for D.Mel-2 cells).

[0535] These control dsRNAs were prepared in 96 reactions in a 96-well plate format essentially as before, with some minor differences:

[0536] For PCR amplification of RFP gene specific sequence 0.1 μl 0.5 mg/ml 716 bp RFP sequence cloned into pGEM-T Easy vector (Invitrogen) together with primers RFP-1 and RFP-2 as follows:

RFP-1
TAATACGACTCACTATAGGGCGAATTGGGCCCGACGT
RFP-2
TAATACGACTCACTATAGGGCGATGCAGGCGGCCGCGAATTCACTAGT

[0537] polo specific sequence was amplified from D.MeI-2 cDNA using primers RNAi7 and RNAi8:

RNAi7
GAATTAATACGACTCACTATAGGGAGAGGCCGCGAAGCCCGAGGATAAGA
GCA
RNAi8
GAATTAATACGACTCACTATAGGGAGAGATGACCATATCCGCCGCCGGTT
TCCTT

[0538] orbit specific sequence was amplified from D.Mel-2 genomic DNA using primers RNAi192 and RNAi193:

RNAi192
TAATACGACTCACTATAGGGAGACCCGCATTGGCCGAACACCTGGAACC)
RNAi193
TAATACGACTCACTATAGGGAGAACGTCGAGACCCCGCACCTGTAGAGT

[0539] The 96 dsRNA preparations for polo, orbit or RFP were pooled and the concentrations assessed from A₂₆₀/A₂₈₀ values. The samples were aliquoted and stored at −20° C.

[0540] v) The quality and concentration of dsRNA in the samples was assessed by agarose gel electrophoresis and by fluorometry using PicoGreen reagent (Molecular Probes, PoortGebouw, Rijnsburgerweg 10, 2333 AA Leiden, The Netherlands) and a KC4 fluorometer (Bio-Teks Instruments, Inc., Winooski, Vt.) linked to the RoboSeq 4204SE, following manufacturers' recommendations. The standard curve used to assess dsRNA concentrations was generated using orbit dsRNA prepared essentially as above, with the exception that the dsRNA (200 μg) was treated with 20 μg/ml RNaseA in the presence of 0.3 M NaCl for 30 minutes at 30° C., to remove ssRNA. The reaction was terminated with 0.1 mg/ml proteinase K and the dsRNA purified by extracting once with phenol/chloroform, once with chloroform and precipitating with 0.1 volume NaOAc (pH5.2) and 2.5 volumes absolute ethanol (−20° C.). Following centrifuging at 13000 rpm for 30 minutes at 4° C., the dsRNA pellet was washed with 70% EtOH (−20° C.), and resuspended in 200 μl RNase-free, DNase-free Milli-Q H₂O. The concentration of this standard dsRNA was assessed using A₂₆₀/A₂₈₀ readings.

[0541] vi) Each Drosophila gene specific dsRNA was diluted and arrayed into 3 wells of a 96-well Packard Viewplate, using 1 μg dsRNA per well, ready for transfection.

[0542] 3) RNA Interference in Drosophila D.Mel-2 Cells

[0543] i) D.Mel-2 cells were cultured as follows ready for transfection with dsRNA.

[0544] A cryovial containing 1 ml cryopreserved D.Mel-2 cells (Passage #8) in 10% DMSO, Drosophila-SFM (GIbco #15240), 1% 200 mM L-glutamine (GIbco #25030) and 1% Penicllin/Streptomycin Solution (GIbco #15140) was rapidly thawed and the entire contents transferred into a 25 cm² tissue culture flask containing 5 ml Drosophila-SFM/glutamine/Pen-Strep. The cells were grown at 28° C. for 4-5 days until they approached confluency, when they were transferred to a 75 cm² tissue culture flask containing 10 ml Drosophila-SFM/glutamine/Pen-Strep. The cells were again grown at 28° C. for 3-4 days, until they approached confluency. Cells were split 1:10 and into fresh medium every 3-4 days with the date and passage number recorded on the flask. After thawing, the D.Mel-2 cells were ready for transfection following 3 passages.

[0545] ii) For each new batch of D.Mel-2 cells, the efficiency of dsRNA transfection of the cells was assessed, using fluorescently labelled dsRNA as follows.

[0546] Using 8 μl RFP, Drosophila polo or Drosophila orbit specific PCR products, including a 5′ T7 RNA polymerase binding site on each strand, dsRNA was synthesised using amino-allyl substituted UTP, setting up 3 reactions with each template. Each reaction comprised of 6.12 μl 3.27×T7 RNA polymerase buffer (130.7 mM HEPES (pH 8.1), 16.3 mM DTT, 13.1% PEG 8000, 0.03% Triton X-100, 65.3 mM Mg(OAc)), 1 μl 100 mM ATP, 1 μl 100mM CTP, 1 μl 100 mM GTP, 1 μl 100 mM amino-allyl-UTP (Sigma A5660), 0.5 μl 50 U/μl yeast inorganic pyrophosphatase, 1 μl 20 U/μl Rnasin and 0.5 μl 80 U/μl T7 RNA polymerase.

[0547] Unlabelled RFP, Drosophila polo or Drosophila orbit dsRNA was also synthesised in the same way, only using 1 μl 100 mM UTP in each reaction instead of the amino-allyl substituted UTP.

[0548] The reactions were incubated at 37° C. for 4 hours in the PTC-225 thermocycler, and then treated with DNase 1 (2 U/μl) at 37° C. for 15 mins and annealed by heating to 95° C. for 10 minutes and then cooling to 4° C. over a 15 hour period. The 3 equivalent reactions containing labelled or unlabelled RFP, Drosophila polo or Drosophila orbit dsRNA were pooled and 140 μl RNase- and DNase-free water added to each.

[0549] 18 BioRad P30 MicroBiospin columns were buffer exchanged to 100 mM NaHCO₃ (pH7.5) by washing the columns through 3 times with 0.5 ml buffer per wash. Each of the pooled dsRNA preparations were divided into 3 and passed through a column (65 μl per column) following manufacturer's recommendations, then re-pooled. To each of the purified dsRNA preparations, 33 μl AlexaFluor 594-succinimidyl ester (Molecular Probes A-20004) resuspended at 10 mg/ml in DMSO, and 8 μl 500 mM NaHCO₃ (pH7.5) was added. The dsRNA and label were incubated at room temperature in the dark overnight.

[0550] Once again, each of the dsRNA preparations was purifed by splitting them in three and passing each through a BioRad P30 MicroBiospin column (10 mM Tris pH7.4). The 3 purified dsRNA preparations were re-pooled and precipitated by the addition of 0.1 volumes NaOAc (pH5.2) and 2.5 volumes absolute ethanol (−20° C.). The dsRNA was centrifuged at 13000 rpm for 30 minutes at 4° C. and the supernatant removed. The pellet was washed twice with 70% EtOH (−20° C.), then allowed to air dry, and resuspended in 200 μl 10 mM Tris (pH8.0).

[0551] The concentration and quality of dsRNA in the samples was assessed from A₂₆₀/A₂₈₀ readings and by agarose gel electrophoresis. The concentrations of the dsRNA preparations were adjusted to 67 ng/μl and 15 μl of each aliquoted into 16 wells of a Packard viewplate:
[0552] Labeled polo dsRNA in columns 1 and 2
[0553] Labeled orbit dsRNA in columns 3 and 4
[0554] Labeled RFP dsRNA in columns 5 and 6
[0555] Unlabeled polo dsRNA in columns 7 and 8
[0556] Unlabeled orbit dsRNA in columns 9 and 10
[0557] Unlabeled RFP dsRNA in columns 11 and 12

[0558] To each well 35 μl of logarithmically growing D.Mel-2 cells diluted to 2.3×10⁵ cells/ml in fresh Drosophila-SFM/glutamine/Pen-Strep pre-warmed to 28° C. was added. The cells were incubated with the dsRNA (60 nM) in a humid chamber at 28° C. for 1 hr, then 100 II Drosophila-SFM/glutamine/Pen-Strep pre-warmed to 28° C. was added and the cells containing the dsRNA returned to the humid chamber at 28° C. for 72 hrs. The medium was removed and the cells incubated with 100 μl Fixation Solution (3.7% formaldehyde, 1.33 mM CaCl₂, 2.69 mM KCl, 1.47 mM KH₂PO₄, 0.52 mM MgCl₂-6H₂O, 137 mM NaCl, 8.50 mM Na₂HPO₄.7H₂O) pre-warmed to 28° C. 15 minutes. The Fixation Solution was removed and the cells washed with 100 μl Wash Buffer (1.33 mM CaCl₂, 2.69 mM KCl, 1.47 mM KH₂PO₄, 0.52 mM MgCl₂-6H₂O, 137 mM NaCl, 8.50 mM Na₂HPO₄.7H₂O). The cells were treated with 100 μl Permeabilisation Buffer (30.8 mM NaCl, 0.31 mM KH₂PO₄, 0.57 mM Na₂HPO₄.7H₂O, 0.02% Triton X-100) for 15 minutes and once more with 100 μl Wash Buffer, prior to the addition of 50 μl Staining Solution (1 μg/ml Hoechst 33258, 1.33 mM CaCl₂, 2.69 mM KCl, 1.47 mM KH₂PO₄, 0.52 mM MgCl₂-6H₂O, 137 mM NaCl, 8.50 mM Na₂HPO₄.7H₂O) per well. The cells were incubated with the Staining solution for 1 hour protected from the light. The Staining Solution was removed and the cells washed twice with 100 μl Wash Buffer. 200 μL Wash Buffer containing 0.02% sodium azide was finally added to the cells, the plates were sealed and the transfection efficiency analysed using the Cellomics ArrayScan HCS System (Cellomics Europe, St. Mary's Court, The Broadway, Old Amersham, Bucks, HP7 OUT, UK), with the 10× objective and the QuadBGRFR filter set following manufacturer's recommendations.

[0559] iii) Transfection of D.Mel-2 cells with gene specific dsRNA was carried out as for fluorescently labelled control dsRNA detailed above.

[0560] Following incubation of D.Mel-2 cells with the dsRNA for 72 hrs at 28° C., the cells were fixed and stained using the Cellomics Mitotic Index Hitkit, essentially following the manufacturer's recommendations, with the exception that the Fixation solution was pre-warmed to 28° C. and only half the specified volumes of primary and secondary antibody were added to the Primary Antibody Solution and to the Staining Solution, respectively. The kit provides a fixed endpoint assay based on immunofluorescence detection and localisation of a phosphorylated core histone protein that is abundant in the nuclei of dividing cells, to enable a determination of the Mitotic Index. The Mitotic Index (MI) represents the fraction of cells within a population under-going cell division and is a valuable means of characterising cell proliferation. The calculated value for mitotic index is often higher in cancerous cells due to uncontrolled cell proliferation.

[0561] The Mitotic Indices were analysed following manufacturer's recommendations, using the Cellomics Array Scan HCS System, with the 10× objective and the DualBGlp filter set.

[0562] 2,500 cells were assessed for each well as confirmed, by viewing cell counts for the wells of each plate within Data Viewer.

[0563] The average MI value, the standard deviation and Ttest scores (assuming a two-tailed distribution with two samples of equal variance) for each gene, compared to the RFP control on the plate containing the gene was calculated from Mitotic Index data generated by the Arrayscan. The Ttest scores for each gene, compared to the water control on the plate containing the gene was also calculated, again assuming a two-tailed distribution with two samples of equal variance and the two Ttest scores for each gene combined to give an aggregate Ttest score. The Mitotic Index for D.Mel-2 cells transfected with each gene specific dsRNA was also expressed as a percentage of the mitotic index for cells transfected with the RFP control dsRNA for that plate. The percentage change in MI for each gene, relative to the RFP control was also calculated where:

$$\begin{matrix}change in \% MI \\ of gene X\end{matrix} = ( ( \frac{\begin{matrix}MI for cells transfected with \\ gene X specific dsRNA\end{matrix}}{\begin{matrix}MI for cells transfected with \\ RFP specific dsRNA\end{matrix}} ) \times 100 ) - 100$$

and from this the absolute change in MI was identified.

[0564] Genes with an aggregate Ttest score less than 0.1 were viewed as significant and were ranked according to their absolute change in MI relative to the RFP control for further analysis (See Table 2 below).

TABLE 2

Mitotic Index Data

| | | | |
|---|---|---|---|
| | | | MI as % |
| Drosophila | | Aggregate | Change |
| Gene | Froward and reverse primer sequences | T Test | Relative |
| Name | (including T7 RNA polyerase binding site) | Score | to RFP |

| | | | |
|---|---|---|---|
| CG3632 | TAATACGACTCACTATAGGGAGAAGGTGCGAGATCTGTTCCAGCTGATT | 0.0740 | 126.6 |
| | TAATACGACTCACTATAGGGAGAAGGGCACAAGCAATTTGGGTGGATAC | | |
| Pp1-87B | TAATACGACTCACTATAGGGAGATCCGCCGGAATCGAATTACCTGTTC | 0.0048 | 107.8 |
| | TAATACGACTCACTATAGGGAGAACTTGATGGGCTCGGCAGATGAGAT | | |
| CG3524 | TAATACGACTCACTATAGGGAGAGGCAAAGAAGCACCAACAGAAGTTA | 0.0914 | 82.5 |
| | TAATACGACTCACTATAGGGAGATCTGGGCTAGCATATTCACAGAGTA | | |
| CG9311 | TAATACGACTCACTATAGGGAGACTACCAAACAGCGGCAGGTTATTCAG | 0.0980 | 74.6 |
| | TAATACGACTCACTATAGGGAGAGTTGCTGCTGATATGCCAGTGGTTGT | | |
| CG9092 | TAATACGACTCACTATAGGGAGATTAGCAAGGGTTGGGGCAGCACACT | 0.0212 | 61.4 |
| | TAATACGACTCACTATAGGGAGACACTGCAGGTAGATCCTCGCCAGTT | | |
| Arr1 | TAATACGACTCACTATAGGGAGACAATTTCCGATATGGGCGCGAGGAC | 0.0402 | −54.4 |
| | TAATACGACTCACTATAGGGAGACTTCACCACCTTGTTGGAGTTGTTG | | |
| CG9150 | TAATACGACTCACTATAGGGAGAGGTGGCAGAACAAACTGGCTGTGGT | 0.0843 | −53.0 |
| | TAATACGACTCACTATAGGGAGAATGGCGGTGATGGCAAACTTGGTGG | | |
| CG11102 | TAATACGACTCACTATAGGGAGAATGCTTTGGCTGCTGTTGCGGTACAAGT | 0.0049 | 51.0 |
| | TAATACGACTCACTATAGGGAGAGCGGAGAGTAACTGAAGCACTGGAG | | |
| Smr | TAATACGACTCACTATAGGGAGACCGCCGGAGACCATAATCTACAATG | 0.0606 | 50.3 |
| | TAATACGACTCACTATAGGGAGACGGGCACTGGTACTGGTTGTAGATA | | |
| CG8045 | TAATACGACTCACTATAGGGAGACTGCTGTCGGTGGCGTACAAGAATG | 0.0065 | −49.5 |
| | TAATACGACTCACTATAGGGAGACTCAGTGTATCCAACTCGGCAATGG | | |
| CG10420 | TAATACGACTCACTATAGGGAGAGGAGTCTATACGGCGGGTCAAGGAG | 0.0509 | 49.4 |
| | TAATACGACTCACTATAGGGAGAGAGCCTGTGTACCCGAGGTGGAAAG | | |
| Hsc70-2 | TAATACGACTCACTATAGGGAGAGAAGTTCGACGACAAGAAGATACAG | 0.0116 | −47.4 |
| | TAATACGACTCACTATAGGGAGACGCTTGAATTCCTCGGCAAAATGAT | | |
| CG10805 | TAATACGACTCACTATAGGGAGAATTAATCAGTAATCGCAAGCTGGTG | 0.0746 | 46.1 |
| | TAATACGACTCACTATAGGGAGATAGCTTCTGTTCAAGTTGGACATAG | | |
| eIF-4a | TAATACGACTCACTATAGGGAGACTGCCACCTTCTCGATTGCTATCCT | 0.0263 | −45.7 |
| | TAATACGACTCACTATAGGGAGACTCCTGCTTCACGTTGACGTAAAAC | | |
| ACXA | TAATACGACTCACTATAGGGAGATCCAACTGGCCTCTTAATACCTTAT | 0.0166 | 44.8 |
| | TAATACGACTCACTATAGGGAGACATAAAGGATACTGACATCGTTGTG | | |
| CG15117 | TAATACGACTCACTATAGGGAGATGTACGATAAGGATGGCATATTGGT | 0.0690 | 44.1 |
| | TAATACGACTCACTATAGGGAGAGAAAATCGAAGCCAAGAGCATTAGT | | |
| BG:DS01759.2 | TAATACGACTCACTATAGGGAGAGAACTCAAAACGATGCTGGTCAAGT | 0.0521 | 43.6 |
| | TAATACGACTCACTATAGGGAGAAAATCAATAGGTCCAGTAGATGGGG | | |
| TepIII | TAATACGACTCACTATAGGGAGAGCGTTCATACGAACTGAGCGATGTG | 0.0165 | −41.4 |
| | TAATACGACTCACTATAGGGAGAGAGTAGGGCAACTCGGTGCTTATGT | | |
| Hsc70-4 | TAATACGACTCACTATAGGGAGACTATCTGGGCAAGACTGTGACCAAC | 0.0711 | −40.9 |
| | TAATACGACTCACTATAGGGAGAGGCACGAGTAATCGAGGTGTAGAAG | | |
| CG7069 | TAATACGACTCACTATAGGGAGACCAAGAAGGAGATGGCAGACAAGAG | 0.0292 | −40.3 |
| | TAATACGACTCACTATAGGGAGACAATCGATTTCTGGGCTAGGGGAAC | | |
| ACXE | TAATACGACTCACTATAGGGAGATCCACTTCATCAGCGGTGCAGTCCT | 0.0433 | 39.2 |
| | TAATACGACTCACTATAGGGAGAGAGATCGTGCAGGACCTTCACCAAC | | |
| EG:52C10.5 | TAATACGACTCACTATAGGGAGAGCAGAACTTCGATCTAAGCGACCAA | 0.0813 | −37.9 |
| | TAATACGACTCACTATAGGGAGATCAGCTAGCTTCGACTGAATGTCTC | | |
| gatA | TAATACGACTCACTATAGGGAGAAAGGTGGCCGATTTGCTGGAGTGTA | 0.0851 | 37.1 |
| | TAATACGACTCACTATAGGGAGAGAATCGGTATAGACACGGCGGGAAT | | |
| CG17149 | TAATACGACTCACTATAGGGAGAAGAGGCCTGCTTTCCGGACATCAGT | 0.0283 | 36.6 |
| | TAATACGACTCACTATAGGGAGAGTGGACATGTCTGCTGGATGGGAAC | | |
| CG2905 | TAATACGACTCACTATAGGGAGAGATAAAGTTCTTGCTACAGTGGAAA | 0.0314 | −35.8 |
| | TAATACGACTCACTATAGGGAGAAAAGGTAAAGCATTTGAATCAGGAG | | |
| CG2336 | TAATACGACTCACTATAGGGAGATCAGTCTAGAAGAGGAGGTTCAATA | 0.0419 | 35.7 |
| | TAATACGACTCACTATAGGGAGACAACTATTCTCTTTGCCTGTAAGTG | | |
| TER94 | TAATACGACTCACTATAGGGAGAGGTCTGGAGAGCGTCAAGAAGGAAT | 0.0623 | −35.6 |
| | TAATACGACTCACTATAGGGAGACGGGCAGCGGAATATAGATCAACTG | | |
| CG6313 | TAATACGACTCACTATAGGGAGACCGCAATCTAGCCAACAAGCTCTCA | 0.0752 | −35.2 |
| | TAATACGACTCACTATAGGGAGAGGCGCAGTACGTTATTAGCATCCAC | | |
| aur | TAATACGACTCACTATAGGGAGAACGTGCGCATATATCTGATCTTGGA | 0.0147 | 35.1 |
| | TAATACGACTCACTATAGGGAGAATTAAGGACCAGCAGCTTGGAAATG | | |
| Pk91C | TAATACGACTCACTATAGGGAGAGCGATAGCAAGATATCTGGTGTTTC | 0.0560 | 34.9 |
| | TATACGACTCACTATAGGGAGAGCTTAGGTTGTCCACATTCTTCTCA | | |
| Top2 | TAATACGACTCAOTATAGGGAGAAGGTGGTTTCTACCGAGTGTTCAAA | 0.0071 | 34.3 |
| | TAATACGACTCACTATAGGGAGATCTGTCAACATCCACATGGACATAC | | |
| Alpha-Est1 | TAATACGACTCACTATAGGGAGATCCGAAATGGCCGCACAGGGTATTA | 0.0185 | 33.4 |
| | TAATACGACTCACTATAGGGAGAGATTGAAATGGGGCGAGTCCACATC | | |
| Nrk | TAATACGACTCACTATAGGGAGAAGATCTACTAGTCGCTGTTAAGATG | 0.0453 | 33.1 |
| | TAATACGACTCACTATAGGGAGAAAGCGAGAACTTGTTGTACAGTATG | | |
| otk | TAATACGACTCACTATAGGGAGACAAGCCGACAATTCAGTGGGACAAG | 0.0506 | 33.1 |
| | TAATACGACTCACTATAGGGAGACTGCAGGCTGTGTCATCGGATTTCT | | |
| cad | TAATACGACTCACTATAGGGAGAGGCGGATAACTTCGTTCAGAATGTG | 0.0587 | 32.4 |
| | TAATACGACTCACTATAGGGAGAGATAGGCGGGCTTCTTCATCCAGTC | | |
| rut | TAATACGACTCACTATAGGGAGAGCGCCAAAGTACGAGCCACCACGTTACA | 0.0343 | 30.7 |
| | TAATACGACTCACTATAGGGAGACATGTCGACGACCGGAGAGGTGGGA | | |
| CG8002 | TAATACGACTCACTATAGGGAGAAGCTGCACATTGACGATACGGAGAG | 0.0560 | 30.4 |
| | TAATACGACTCACTATAGGGAGAATGCCGACAAGCTCTTGGTCACAGT | | |
| CG10335 | TAATACGACTCACTATAGGGAGACACAATCTCATGTATCCGGTGTTCA | 0.0678 | 30.3 |
| | TAATACGACTCACTATAGGGAGAAATTGGATGTGAACTTGGCGGAGTA | | |
| CG8070 | TAATACGACTCACTATAGGGAGAGGGTGCTTCTCTAAGGTAACAAAAG | 0.0493 | 30.2 |
| | TAATACGACTCACTATAGGGAGATTAGGATAGGCTCGATGATGTGTCC | | |
| CG7460 | TAATACGACTCACTATAGGGAGACCTTTAGATGCGTTCGATCCAACAA | 0.0568 | 29.3 |
| | TAATACGACTCACTATAGGGAGAATGACATGATCCGCTGTGATTACCT | | |
| CG17735 | TAATACGACTCACTATAGGGAGACCTTCAGAGCTGTACGAACTTACCT | 0.0658 | −29.1 |
| | TAATACGACTCACTATAGGGAGAAGATGGACGGCGCTTTACTTGATTG | | |
| Gycalpha99B | TAATACGACTCACTATAGGGAGAGCTCTACAAGGTGGACGTGAACATC | 0.0720 | 28.4 |
| | TAATACGACTCACTATAGGGAGAAGAGCAACGAATTGGACTCGGGACA | | |
| CG13893 | TAATACGACTCACTATAGGGAGAACGATCAGAGTCAAAAGCACGGATGG | 0.0943 | 28.3 |
| | TAATACGACTCACTATAGGGAGATGACCTTAAAGTGCAGCTTCAACTT | | |
| CG18176 | TAATACGACTCACTATAGGGAGAAAAAGGTTGTTCAGTGCTTTGAGAA | 0.0751 | −28.3 |
| | TAATACGACTCACTATAGGGAGAACATGACCAAACTTTTGCAGATAGT | | |
| CG8858 | TAATACGACTCACTATAGGGAGAACATGAGCTGGAACCTGCTGGAAAA | 0.0617 | 27.8 |
| | TAATACGACTCACTATAGGGAGACTCAGOCGCTTGATCAGCATAAGAA | | |
| Ac76E | TAATACGACTCACTATAGGGAGAGTGCCACCGAAACCAGCATACACCT | 0.0907 | 27.0 |
| | TAATACGACTCACTATAGGGAGATCCGCTGTTGGAGATGCCGCTCTCT | | |
| CG17010 | TAATACGACTCACTATAGGGAGAACGTGGCTGGTGCGAATGTATTTCT | 0.0034 | −26.0 |
| | TAATACGACTCACTATAGGGAGATGCCGCACTGATATGATGTTCTGTG | | |
| tkv | TAATACGACTCACTATAGGGAGAGAACCATTGCCAAGCAGATTCAGAT | 0.0863 | 25.8 |
| | TAATACGACTCACTATAGGGAGATGAATGACATCCAGTTCCGAGTTGT | | |
| dnt | TAATACGACTCACTATAGGGAGAGACCGGCGATCAATGTGTCACACAG | 0.0886 | 25.6 |
| | TAATACGACTCACTATAGGGAGAACTGGAACTTTCCGTGGCAAGGAGG | | |
| ACXD | TAATACGACTCACTATAGGGAGAATGTTTACCACGCCACCAGCCACAA | 0.0673 | 25.1 |
| | TAATACGACTCACTATAGGGAGAATGGTCCGGTTGTCGCCACCTTTTA | | |
| Aats-ala-m | TAATACGACTCACTATAGGGAGACTATTGTGGTGGAGACACTTGGTGA | 0.0676 | 25.0 |
| | TAATACGACTCACTATAGGGAGAGGAGTAGGTGTACTTGTGACTGTTG | | |
| gek | TAATACGACTCACTATAGGGAGAGCAACAAACACAGGAAAGGCTGAAG | 0.0959 | −24.9 |
| | TAATACGACTCACTATAGGGAGAGGATATGAGGTCCGATCTGGTTTGA | | |
| CG3216 | TAATACGACTCACTATAGGGAGATCTACCAAATCCTGCCGCGTCCTGT | 0.0999 | 24.7 |
| | TAATACGACTCACTATAGGGAGAGGTGGCCGAGGACACATGTATCTTG | | |
| CG5653 | TAATACGACTCACTATAGGGAGAGTACCACGAATGTGATGGCGACAAG | 0.0703 | 24.1 |
| | TAATACGACTCACTATAGGGAGACCATCAACATTCGGGGCTGACAAGT | | |
| GG17740 | TAATACGACTCACTATAGGGAGACGAGGCAGAGAACTTTGGTGACTAC | 0.0969 | −23.6 |
| | TAATACGACTCACTATAGGGAGAAGCATGCACTCATCCGCACAGAAGT | | |
| Tepl | TAATACGACTCACTATAGGGAGAAATGGATGTGAAGGCGAAAGTATTA | 0.0572 | 23.4 |
| | TAATACGACTCACTATAGGGAGAGTATACTGGGCACAAAGTTAAACAT | | |
| for (CT43154 | TAATACGACTCACTATAGGGAGACGTTCAGCAGAAGTGTGGTCAGGTC | 0.0213 | 22.5 |
| & CT43158) | TAATACGACTCACTATAGGGAGACCGTCCGCTGGCAGTTGTACAGGAT | | |
| Ac13E | TAATACGACTCACTATAGGGAGAACTCAACCAGACGGCGATTAGTCAG | 0.0992 | 21.3 |
| | TAATACGACTCACTATAGGGAGAAAGCAGGAGAACAAGGTCACCCACA | | |
| CG2667 | TAATACGACTCACTATAGGGAGATGCCGGAACTGCAGGGAATTGTGAT | 0.0180 | 21.2 |
| | TAATACGACTCACTATAGGGAGAGAGCTGACGGCTTCGATGAAGTTGA | | |
| CG7842 | TAATACGACTCACTATAGGGAGAGGAGGGACCACGTGAGAAACTGAAT | 0.0397 | 21.2 |
| | TAATACGACTCACTATAGGGAGAACGGCGCTTTGCATTAGAGGAGTGT | | |
| CG17486 | TAATACGACTCACTATAGGGAGAACGCACTTGGAAGAAATTCACTATT | 0.0501 | 20.3 |
| | TAATACGACTCACTATAGGGAGATAGAATACACAATTTTGCGTGTCTG | | |
| CG6969 | TAATACGACTCACTATAGGGAGAACAGAAGATCCACCGGGGTGTGTAA | 0.0226 | 20.2 |
| | TAATACGACTCACTATAGGGAGACTGATTTTGCCGCTGCTCCAGATTG | | |
| CG12262 | TAATACGACTCACTATAGGGAGAGGTTCATTGTGGAGCGCGACAGTCC | 0.0966 | 19.6 |
| | TAATACGACTCACTATAGGGAGACTCCACGGGATACTCGCTGTTGAAG | | |
| fray | TAATACGACTCACTATAGGGAGAATTAAGCGCATCAACCTGGAGAAGT | 0.0749 | 19.5 |
| | TAATACGACTCACTATAGGGAGACCAAATGTCCGCCTTAAAGTCATAG | | |
| CG6879 | TAATACGACTCACTATAGGGAGACCGGATACAACGTGACCTCACTGGA | 0.0645 | 19.5 |
| | TAATACGACTCACTATAGGGAGACACCTCTTCCGCCAATCTGGTAGGT | | |
| CG11594 | TAATACGACTCACTATAGGGAGAGAGGAATCTGTCACAGACTTTTGGA | 0.0076 | 19.0 |
| | TAATACGACTCACTATAGGGAGACGTTTAGGAAGTAGCCGGGAATAAT | | |
| S6kll | TAATACGACTCACTATAGGGAGAATTTTGCCGCTGATTGGTGGAGTTT | 0.0168 | 18.9 |
| | TAATACGACTCACTATAGGGAGACAGCAGGAATAGGAGCTATACTATG | | |
| CG11714 | TAATACGACTCACTATAGGGAGAGAGTTACTTCGTCTATTCCAGTGTG | 0.0346 | 18.4 |
| | TAATACGACTCACTATAGGGAGATACTTCTCAGCCAGGCTAAGGAAAT | | |
| CG3534 | TAATACGACTCACTATAGGGAGACCACCACCAAACAGTGCCTAGAGAT | 0.0877 | 17.9 |
| | TAATACGACTCACTATAGGGAGACCTTCAAGCTCATCATTAGGGTGTC | | |
| CG7335 | TAATACGACTCACTATAGGGAGAAGGAGCTCACCTACCAGCAGTTTGT | 0.0094 | 17.8 |
| | TAATACGACTCACTATAGGGAGACCACTAATTTGGGCGGAATCTGGGA | | |
| CG11275 | TAATACGACTCACTATAGGGAGAAGCTGTACTACGCCGCTGAGAAGTA | 0.0040 | 17.7 |
| | TAATACGACTCACTATAGGGAGAACAGCGGAGTTTCTGCATCCACTGT | | |
| CG16726 | TAATACGACTCACTATAGGGAGAGCGAATCCAATGTCACGGAATACAA | 0.0359 | 17.3 |
| | TAATACGACTCACTATAGGGAGATGGCAATGACTATATAGGGCAGACA | | |
| CG7514 | TAATACGACTCACTATAGGGAGACCACTGTGTTGGCCAGCATGGGTAT | 0.0939 | 17.0 |
| | TAATACGACTCACTATAGGGAGAGTGTGCGGTCCTAAGCGACACAAAT | | |
| CG17283 | TAATACGACTCACTATAGGGAGAAAATTAGGGCCAAGACCGAGTCAAT | 0.0921 | 16.8 |
| | TAATACGACTCACTATAGGGAGACGAAATTTGAGGTCACGAAAGTGGT | | |
| BcDNA:GH07 | TAATACGACTCACTATAGGGAGAGGCCACCGAGCAGAACTTTAACTGG | 0.0885 | 16.7 |
| 626 | TAATACGACTCACTATAGGGAGACGGCCAGCTTACCAGAGGTCAACAT | | |
| CG16752 | TAATACGACTCACTATAGGGAGAGTATATTGCATTGCTGGCGTTTCTG | 0.0333 | 16.3 |
| | TAATACGACTCACTATAGGGAGATGCCGCAGTAAATGCCGAAGTTGAT | | |
| Rpt1 | TAATACGACTCACTATAGGGAGATGAGCTGGTGCAAAAGTACGTGGGT | 0.0418 | −15.8 |
| | TAATACGACTCACTATAGGGAGAGGCTTCGAGGAAATCCTTCTCTGTG | | |
| wts | TAATACGACTCACTATAGGGAGAAACAGCAACTGCAGGCCTTGAGGGT | 0.0630 | 15.7 |
| | TAATACGACTCACTATAGGGAGAATACGTGCGCTGGCGATACGACTTG | | |
| CG1582 | TAATACGACTCACTATAGGGAGATCAACTGCCAGCAAAGGAGAACTTG | 0.0531 | −15.7 |
| | TAATACGACTCACTATAGGGAGATAAGCTTGCGGCAGTACTTAGTGTC | | |
| CG12289 | TAATACGACTCACTATAGGGAGACACCAAGTATATAGCCGAGTCCAGA | 0.0349 | −14.6 |
| | TAATACGACTCACTATAGGGAGATCAGTGGGTGCAATGGAGGACTTTT | | |
| Pepck | TAATACGACTCACTATAGGGAGAGTTGCACAAGCTGCGCCAGGACAAT | 0.0124 | −14.2 |
| | TAATACGACTCACTATAGGGAGACACCACGTAAGCAGAGTCCGTCAGT | | |
| CG5665 | TAATACGACTCACTATAGGGAGAATTCACTAGGAGCTCACATTATGGG | 0.0576 | 14.0 |
| | TAATACGACTCACTATAGGGAGACACGTTTTAAGCCTAGGATCAACAG | | |
| CG7285 | TAATACGACTCACTATAGGGAGAACACGAACGAGAGCTTATATACCAC | 0.0930 | 13.6 |
| | TAATACGACTCACTATAGGGAGAAGACCACTTTGGCAATATGCAGAGT | | |
| bt | TAATACGACTCACTATAGGGAGACGGACCACTTCAAATATCAGATGTG | 0.0177 | 13.4 |
| | TAATACGACTCACTATAGGGAGAGGAAACTCGGAATTTGTAGGTTTGG | | |
| CG8795 | TAATACGACTCACTATAGGGAGAATGGCAGTGGCAATGGAACGACAAC | 0.0865 | 13.3 |
| | TAATACGACTCACTATAGGGAGAGGTTTGTGGCTGCCTTTGCGTCTGG | | |
| CG10967 | TAATACGACTCACTATAGGGAGAAGCGCAAGAGCAGTGTGAGCAGTGA | 0.0498 | 12.4 |
| | TAATACGACTCACTATAGGGAGACGCCAGCACAAAGTTCAGCTTGGAC | | |
| CG3809 | TAATACGACTCACTATAGGGAGACTTCTTTCTGGCCGTTTGTCCACCT | 0.0959 | 11.8 |
| | TAATACGACTCACTATAGGGAGAGCTTATCGATCTGAACACCGACCAC | | |
| Ack | TAATACGACTCACTATAGGGAGATCTACTCGAATTTCAACCAGTCTCT | 0.0319 | 10.0 |
| | TAATACGACTCACTATAGGGAGATCATACCAAATACGATTCACCACAC | | |
| Abl | TAATACGACTCACTATAGGGAGACACGGGCGATAGTCTGGAGCAGAGT | 0.0449 | 9.2 |
| | TAATACGACTCACTATAGGGAGACGGAATGGGGCTGGCCTTCGGATTT | | |
| CG7362 | TAATACGACTCACTATAGGGAGACCGCGAATCCGATGGCATAATGGTG | 0.0886 | −9.0 |
| | TAATACGACTCACTATAGGGAGATAGGACACGGCGGCCTCATTTGACT | | |
| Cyp9f2 | TAATACGACTCACTATAGGGAGAATGAAATACCGACAGGAGCACAATA | 0.0438 | 6.4 |
| | TAATACGACTCACTATAGGGAGACGAACTTCATAGGGTTCTCAAAGTA | | |

4) Analysis Of The Concentration-Dependent Effect of Transfected dsRNA upon Drosophila D.MEL-2 Cells Mitotic Index.

[0565] To confirm the initial effect of gene specific dsRNA on the mitotic index of transfected D.Mel-2 cells and also to demonstrate a dosage dependant effect on MI the concentration dependent effect of dsRNA is tested.

[0566] Drosophila gene specific dsRNA ranging in concentration from 10 ng per well to 4 μg per well is transfected into D.Mel-2 cells and the Mitotic Index of the transfected cells assayed using the Cellomics Mitotic Index Hit Kit as described previously. Each Cellomics assay plate includes the range of gene specific dsRNA samples and also an equivalent range of RFP control dsRNA samples for comparison.

[0567] The resulting data is analysed essentially as before, except that for each gene a bar graph showing the Mitotic Index value for D.Mel-2 cells transfected with the gene specific dsRNA at each concentration and for cells transfected with the control dsRNA at each concentration is constructed. Error bars corresponding to +/−1 standard deviation are also included.

5) Human Homologues

[0568] An automated web query system was used to identify matching BLAST hits from SWISS-PROT for Drosophila genes where RNAi resulted in a significant change in mitotic index in D.Mel-2 cells.

[0569] The Drosophila gene name was used to find matching entries in SWISS-PROT, using the get-entries service (“/cgi-bin/get-entries”) at the EXpert Protein Analysis SYstem world wide web site (“expasy.org”). The search used an exact string match in the gene name field and “Drosophila” in the organism field. One or more accession numbers from the SWISS-PROT and trEMBL datasets were returned by this search.

[0570] Each accession number was used to identify the corresponding full SWISS-PROT entry, which was returned by requesting the accession number from “/cgi-bin/hub” at expasy.org. Each entry was used as a blastp query against the SWISS-PROT database via the BLAST service at expasy.org (“/cgi-bin/blast.pl”). All blast hits were stored, but only those matching rat, mouse or human were included in the output file. The SWISS-PROT files for hits from the above organisms were requested from expasy.org (“/cgi-bin/hub”).

[0571] Human homologues with best homology (>25% similarity and BLAST score >10) over the majority of the Drosophila protein were earmarked for further validation. In some cases, several human proteins were identified as homologues of the Drosophila gene.

[0572] The sequence references for the human homologues are set out in Table 1.

6) Validating Human Mitotic Gene Function by RNAi

[0573] The identified human gene homologues are initially validated by RNA interference of gene expression in U2OS cells, using FACS analysis to identify human genes required for normal cell cycle progression.

i) Designing and Ordering Human Gene Specific siRNA

[0574] siRNA sequences for gene specific RNAi are identified using the siRNA FINDER at the Ambion.com site, in the “/techlib/misc/” directory, in the file “siRNA_finder.html”. siRNAs are identified at the middle and 3′ end of the open reading frame and with a GC content of between 42.9% and 52.4%. BLAST searches are performed with prospective siRNAs to verify that they are unique to the selected human target gene. Where an siRNA shares more than 81% identity with another human gene, the next adjacent siRNA is selected. For each selected sequence, 0.2 Rmole of purified, annealed, duplex siRNA is ordered from Dharmacon (Dharmacon Research, Inc., 1376 Miners Drive, #101, Lafayette, Colo. 80026, USA). siRNAs are resuspended in RNase- and DNase-free water and used to prepare 20 mM stock solutions.

ii) Culturing Human Cell Lines for RNAi analysis

[0575] Human Hela and U20S cell lines are cultured for transfection with siRNA in the following media: 500 ml DMEM with L-glutamine, sodium pyruvate and pyridoxine (GIbco: #41966-029 (InVitrogen Corporation, Carlsbad, Calif., USA)), 50 ml FBS (E.U. approved, Gibco; #10106-169), 5 ml Pen/Strep 5000 IU (GIbco: #15070-063).

[0576] hTERT-BJ1 cell line is cultured in: 400 ml DMEM with L-glutamine, sodium pyruvate and pyridoxine (GIbco: #41966-029), 100 ml M199 with Earle's salts, L-glutamine, NaHCO₃ (Sigma; #M4530), 50 ml FBS (E.U. approved, Gibco; #10106-169).

[0577] To passsage the cells, the culture medium from a 75 cm² flask of cells is removed and the cells washed with pre-warmed (37° C.) PBS (Dulbecco, W/O Calcium and Magnesium, W/O Sodium Bicarbonate; Gibco #14190-094). 0.5 ml pre-warmed (37° C.) Trypsin/EDTA (GIbco #25300-054) is applied and spread evenly on the surface of the cells and incubated for 5 minutes at 37° C. The trypsin is neutralised with 4.5 ml of the pre-warmed (37° C.) appropriate culture medium and the cells washed from the surface of the flask by pipetting.

[0578] Cell densities are measured using a haemocytometer.

iii) FACS analysis of U2OS cells transfected with Gene Specific siRNA is Carried out as Follows.

[0579] U2O S cells are transfected with 240 nM of each gene specific siRNA, using 2 ml 1×10⁵ cells/ml cell suspension per well of the 6-well plates for each transfections and leaving the cells to grow overnight at 37° C./5% CO₂. siRNAs are thawed, the Oligofectamine Reagent is pre-warmed to room temperature and all culture media is pre-warmed to 37° C. In RNase-free, sterile Eppendorf tubes 12 μl of each 20 mM siRNA solution is added to 200 μl of OptiMEM Serum-free medium (GIbco #31985-039). For each transfection reaction, 8 μl of Oligofectamine™ Reagent (Invitrogen #12252-011) is mixed with 52 μl of OptiMEM and incubated for 10 minutes at room temperature. This is prepared as a batch for all the transfections.

[0580] 60 μl Oligofectamine/OptiMEM is mixed with each siRNA and incubate for 15-20 minutes at room temperature. 128 μl of OptiMEM is then added to each siRNA/Oligofectamine mix. After removing the culture medium from the cells, washing briefly with PBS and re-feeding with 600 μl of the appropriate cell culture medium without antibiotics and without FBS, 400 μl siRNA/Oligofectamine mix is added to the cells in the 6-well dish and left to incubate for 4 hours at 37° C./5% CO₂. The culture is subsequently supplemented with 1 ml of the appropriate cell culture medium containing 20% FBS and antibiotics and the cells incubated at 37° C./5% CO₂ for 48 hours.

[0581] For each experiment cells transfected with siRNA (aaCUUACGCUGAGUACUUCGA) targeting the Photinus pyralis (GL3) luciferase gene (Accession no. U47296) (Harborth et al., 2001, J Cell Sci. 114:4557-4565) and cells transfected with no siRNA are included as negative controls. Cells transfected with Ect2 siRNA COD1513 (aaGUGGGCUUUGUAAAGAUGG) shown previously by us to result in a block in mitosis are included as the positive control (See FACS profiles in FIG. 182).

[0582] Following incubation, the supernatant from each well is transferred to a 15 ml centrifuige tube. The well is rinsed with 0.5 ml pre-warmed (37° C.) Trypsin/EDTA and this is combined with the 2 ml of supernatant from the same well. A further 0.5 ml pre-warmed (37° C.) Trypsin/EDTA is added to the remaining cells, spread evenly over the surface of the cells and incubated for 5 minutes at 37° C. The trypsinised cells are added to the 2.5 ml supernatant from the same well and the cells pelleted by centrifuging at 2000 rpm for 5 minutes. The supernatant is removed and the cells resuspended in 1 ml PBS, transferring the resuspended cells to an Eppendorf tube. The cells are pelleted at 2000 rpm for 1 minute in a micofuge, most of the PBS removed and the cells resuspended in the remaining PBS by flicking the tube. 1 ml 70% ethanol is added drop-wise to the cells while vortexing the tube and the fixed cells stored at −20° C. overnight.

[0583] The cells are pelleted by centrifuging at 1000 rpm for 1 minute most of the ethanol removed and the cells resuspended in the remaining ethanol by flicking the tube as before. 0.5 ml PBS is added drop-wise to the cells while vortexing the tube. The cells are incubated with 3 μl 6 mg/ml RNase A and the DNA stained with 12.5 μl 5 mg/ml propidium iodide at 37° C. for 30 minutes, then stored on ice until ready for analysis.

[0584] The DNA content of the cells is analysed with BD FACSCalibur™ System (BD Biosciences, European Office, Denderstraat 24, 9320 Erembodegem, Belgium) using the FL3 channel and CellQuest software.

[0585] Voltages on FSC and SSC channels are altered until the profile appears as shown in FIG. 183.

[0586] The voltage on FL3 channel is also altered to enable analysis of cells in GI, S and G2/M, setting a gate (G2) to exclude doublets resulting from cell clumping, as shown in FIG. 184.

[0587] 10,000 gated events are collected for analysis and dot plots of FSC-H against SSC-H and of FL3-A against FL3-W are generated, as demonstrated above.

[0588] A histogram showing counts against FL3-H within the gated region (G2) and the associated histogram statistics is also generated. Using the histogram statistics, events in G1, in S and in G2/M are calculated, where the number of G1 events was equal to M2×2, the number of G2/M events is equal to M3×2 and the number of S events equated to M1-[(M2×2)+(M3×2)]. See FIG. 185 for example.

[0589] The cell cycle profile for cells transfected with the gene specific siRNA are compared with control cells transfected with GL3 siRNA, by comparison of the statistics and also by overlaying the histogram profiles, to identify human genes required for normal cell cycle progression.

[0590] Changes in cell cycle profile are deemed significant where the FACS profile is noticeably different when compared, by eye, to the negative control profile.

7) Abnormal Human Cell Phenotypes Resulting from siRNA Transfection are Assessed by Immunostaining siRNA-Treated Cells and Microscopic Analysis.

[0591] U2OS and HeLa human cell lines cultured as before are transfected with 240 nM gene specific siRNA, selecting siRNAs previously shown to induce in an abnormal FACS profile in transfected cells. The cells are transfected essentially as detailed above, except that a clean, sterile 22×22 mm coverslip is first placed in each well of the 6-well plates used for transfections.

i) Immunostaining of siRNA-treated Human Cells for Microscopic Analysis is Carried out as Follows:

[0592] The medium is gently removed and the cells incubated with 1 ml Fixation Solution (60 mM PIPES, 25 mM Hepes, 10 mM EGTA, 4 mM MgSO₄, pH to 6.8 with KOH, 3.7% formaldehyde) pre-warmed to 37° C. for 10 minutes at room temperature. The fixation solution is removed and the cells permeablised with 1 ml PBT (PBS+0.1% Triton X-100) for 2 minutes at room temperature. The permeablisation solution is removed and the cells incubated with 1 ml blocking solution (1% BSA/PBS/0.1% Triton X-100), for 1 hour at room temperature. The blocking solution is replaced with 0.5 ml primary antibody solution (1% BSA/PBS/0.1% Triton X-100/1:300 dilution rat YL½ anti-α-tubulin antibody (SeroTec #MCA77G)/1:750 dilution rabbit anti-γ-tubulin antibody (Sigma #DQ-19) and the cells incubated with the primary antibody solution either at room temperature for 2 hours or at 4° C. overnight. The cells are washed 3 times for 5 minutes with 1 ml PBT, then incubated with 0.5 ml secondary antibody solution (1% BSA/PBS/0.1% Triton X-100/1:300 dilution TRITC-donkey anti-rat IgG (Jackson Immunoresearch # 712-026-150)/1:300 dilution AlexaFluor 488-goat anti-rabbit (Molecular Probes #A-11008) at room temperature for 45-60 minutes. The cells are once more washed 3 times for 5 minutes with 1 ml PBT and once for 5 minutes with 1 ml PBS. Finally, the coverslips are mounted, cells-side down on clean microscope slides using mounting medium containing DAPI (1.25% (w/v) n-propylgallate in 75% glycerol/0.5 μg/ml DAPI, stored at 4° C.), sealed with nail enamel and stored, protected from light at 4° C.

ii) Analysis of the Mitotic Phenotype of the Immunostained, siRNA-Treated Cells.

[0593] Staining of DNA (Zeiss filter set 01), α-tubulin (Zeiss filter set 15) and γ-tubulin (Zeiss filter set 10) is observed using Plan-neofluar 40×/1.30 oil Ph3 and Plan-Apochromat 63×/1.40 oil Ph3 objectives on the Zeiss Axioskop 2 plus (Carl Zeiss Ltd., Woodfield Road, Welwyn Garden City, Herts. AL7 1LU, UK) using Axiocam HR CCD camera and AxioVision 3.0 software to acquire images.

[0594] For each experiment, the number of normal looking mitotic cells in prophase/prometaphase, metaphase, anaphase and telophase is quantified as well as the abnormal cells in each stage of the cell cycle. For each experiment, 200-250 mitotic cells are assessed. Of the abnormal cells, the percentage with misaligned chromosomes and lagging chromosomes and the number showing abnormal spindle morphology is quantitated. The number of centrosomes associated with each nucleus is also noted. For a more complete characterisation of the phenotype the ploidy and cell viability (cell confluency and number of apoptotic cells), the number of multinucleated interphase cells and the nuclear and overall cell morphology is assessed. To determine if a particular gene specific siRNA caused an abnormal cell cycle phenotype, comparisons are made with the phenotype of cells transfected with the GL3 siRNA control.

[0595] Positive results are judged as those where the overall mitotic defects were increased from the negative control by about 10% or more. There are also instances, however, where the number of overall mitotic defects does not increase significantly, yet there is a significant increase in the percentage of cells with one particular defect and this would also be viewed as significant.

8) Disease Association

[0596] The level of expression of a gene(s) in tumour and normal cells is determined by assessing the levels of hybridisation of a gene specific radioactive probe to a cancer profile array. The array consists of 240 total cDNAs from tumour cells and from equivalent normal cells from 13 tissue types (Cat no. 7841-1-Clontech Laboratories, Inc., 1020 East Meadow Circle, Palo Alto, Calif. 94303-4230, USA). A gene specific DNA sequence of approximately 500 bp is amplified from a plasmid containing the gene or a part of the gene and the PCR product purified following a standard PCR purification protocol (QIAquick PCR purification—QIAGEN GmbH, Max-Volmer-Strasse 4, 40724 Hilden, Germany). The purified PCR fragment is then radioactively labelling using 6000 Ci/mmol α³²P [dCTP] (Amersham Biosciences UK Ltd., Amersham Place, Little Chalfont, Buckinghamshire HP7 9NA) following a standard random hexamer labelling protocol (High prime—Roche Diagnostics Ltd., Bell Lane, Lewes, East Sussex BN7 1LG, UK).

[0597] Changes in gene expression level between normal and cancer cells are detected by probing the cancer profile array with 100 ng of radiolabelled probe, following the standard manufacturer's protocol (Clontech). Briefly, the cancer profile array is pre-hybridised for 90 minutes at 65° C. in 10 ml ExpressHyb (Clonetech) containing 1.5 mg of denatured sheared salmon testis DNA. The pre-hybridisation solution discarded and the cancer profile array hybridised overnight at 65° C. in 5 ml ExpressHyb containing the labelled DNA probe, 30 kg Cₒt-1 DNA, 150 μg sheared salmon testis DNA and 1% 20×SSC. After hybridisation, the cancer profile array is washed four times in 40 ml 2×SSC, 1% SDS for 30 minutes at 65° C. before 1 wash in 0.1×SSC, 0.5% SDS for 30 minutes at 65° C. A final wash is performed in 5×SSC for 5 minutes at room temperature.

[0598] The gene specific radiolabelled DNA bound to the cancer profile array is detected by exposing the array to X-ray film (Kodak Biomax MR) for 6-14 days at −70° C. using intensifying screens.

[0599] The expression pattern for the gene in the cancer profile array is assessed, by noting the number of cases where gene expression is increased and the number where there is a decrease. Changes in gene expression in tumour cells are deemed significant where more than 50% of the samples in a tissue sample result in a decrease or an increase in gene expression in 4 or more tissue types.

[0600] All patents, patent applications, and published references cited herein are hereby incorporated by reference in their entirety. While this invention has been particularly shown and described with references to preferred embodiments thereof, it will be understood by those of ordinary skill in the art that various changes in form and details may be made herein without departing from the scope of the invention encompassed by the appended claims.

1. A method of identifying an agent that modulates the function of a cell cycle progression polypeptide of SEQ ID NOs: 1-204 (even numbered sequences), the method comprising:
(a) providing a sample containing a cell cycle progression polypeptide of SEQ ID NOs: 1-204 (even numbered sequences), and a candidate agent;
(b) measuring the binding of the cell cycle progression polypeptide of SEQ ID NOs: 1-204 (even numbered sequences) to the candidate agent in the sample; and
(c) comparing the binding of the cell cycle progression polypeptide of SEQ ID NOs: 1-204 (even numbered sequences) to the candidate agent in'the sample with the binding of the polypeptide of SEQ ID NOs: 1-204 (even numbered sequences) to a control agent, wherein the control agent is known to not bind to the polypeptide of SEQ ID NOs: 1-204 (even numbered sequences;
wherein an increase in the binding of the cell cycle progression polypeptide of SEQ ID NOs: 1-204 (even numbered sequences) to the candidate agent in the sample relative to the binding of the cell cycle progression polypeptide of SEQ ID NOs: 1-204 (even numbered sequences) to the control agent indicates that the candidate agent modulates the function of the cell cycle progression polypeptide of SEQ ID NOs:1-204 (even numbered sequences).

The application's sequence listing, which the Patent Office published only in electronic form, follows.

SEQUENCE LISTING (600 sequences)

SEQ ID NO: 1 - DNA, 2678 bp, Drosophila melanogaster
  Name: CG3632
  AE003501
  GI: 10728281
  Transcript: CT12163
atatgcatacatatgtatgtgcaacaacatttgcaaatctttgtttataatagctgacgcttatggattttatggtgccgattcacacaatgtccgatggatcaccgcctccatcgatttgctttatccgtgccgccgaatcgtatccaaagtcacaaatggagaaggaagactcccagctgttcgtcccgtttcaagagttggccggcgaatcgattaagtacctggggcgcacggatgatggtatcctcgccctgtccaattatcggatattcctttccaagcagtcaaccggctacgagacctacgttccattgggattaatcgaatccgtacaggtgcgagatctgttccagctgattgtcaattgtaaggatgccagcactgtgcgctgctcctttccgtcggcggaacagtgctccgactggcagcgccggatccatctgatgatcggggttcccgagtcactggagacactcttcgcctttcccttctactcctggacctgcgatgtgctcggaagtggcaatggaagcggtatcgttagcgcccaggccaacggaaacggcctgattgccaaggatcgttgcctaacgctacacaatggcttggcaaagccaacagccaacgtcacagcgtcgaatcctctgcccgatcctgccagcgagaccatctcagccgccatgagcaatcgcctgcaacgatcagtgcgctatgaaagcgactttaagaacgaggttgcccgcttgggattcgatctgaagggctcgtggcgcatctccacggccaatgccgattttaagctctgtccctcgtatccacccaaattgcttgtgccctgctgtatcaccgatgagatgctccacaacgtggccaacttccggggatcacgaaggctgccggctgtcgtctggcggcaccaaaagtcgggtgccatcttggcccgatgcagccagccggaggtcggttggctcggctggcgcaacacaagggacgagcagctactcaaggcactcgccgatgcctgtgcctttgacaggggcgagcacgccaggcattccacctgcgccaatgcaaaggcgcaaccaacaaagggctccaaggagaccaacggccagtcgggcttatccggcaagagttcaccatctctggacgattcctcgcatgaggaactcacgctggatgaaatcaagaaaatcctcattgtggatgctcgcagctacacctccgcagttacaaatcgtgccagaggtggcggctgtgagtgcatcgagtactatccctgtgcagagattgagtttatgaacttgggcaacatccacgccattcgaaagagtttccacgctgtccgacagctatgcgcgtcatcccccgatgatccaaactggtacggacaactggaaaagaccatgtggatgcagcacctgtcgggtctgctgggagccaccatgaccgttgtgcacaccatcgagaagaatggacgacccgtccttgtacattgctcagacggttgggatcgcactccacagatcgtggccacggcgcaattatgtttggatccctactacagaacggttgaggggttccgcgttcttgtcgagcgtgaatggctgaactttggacacaaattcgccgatcgctctggaaatggtcccaattccgatgaagttaacgagcgatgtccagtttttctgcagtggcttgatcttgtgcatcaaatacacaggcagtatccatgcagttttgagtttagtataagctatttgatcaaactggcgcaacattcgttgtcctgtctcttcggcacgttcctatgcctcatggcgaagacacgatcttctgaagacttaacaacgaatgagttgggacagagcaccatttccaggaggtccagtgatcccaacctgaccgttgaatccatcaactcgatgtttgacatacgatccgaggccaacaacagtgttagcgaaaatgtccaagaaagtgttaaagactccaaagaagtagagctggacgtgacggatgcaactgaaaaactgaactctgaatctgggcgaccttttttcatatttggttcatccgaaaacgatcaaagtccagttcctttaaaatctgaagacacaagtgatatttctcgcgccctgtggcatggcgcaattgaaaccagcactgatacccttattcctgcggagcccgtacaaaaaccaaacagcgacaatagcagtagagatcacataacatcccccacaatggaactggtcagtggtgatagaaagctggagtcgactagcactgtccaagccagtaaaatcagtcagagctacaataatttgcccaaggtacacataagaccgaatgccgttatatgcccgcagcgggtagacgcttttccccatcacctggacctacaagtgccaagggagacgacgggaaatccggaccgttgcaagccggaaaagttagccaaagatgcaaatgcgaatgccaatgccaacggatccctgctggcatccgatggctacaacggcgaggaaagtctctttatatcacccgaccttcagcggttcgtgggccagtcgccattcgatgctccctcgacgggcggacgaatacggcgaaataccttcggctcgagctacagtcgcgatatgaagttcacggctgaaaatggcaggtga

SEQ ID NO: 2 - protein, 1000 aa, Drosophila melanogaster
  AAF48583
  GI:7293200
MSDGSPPPSICFIRAAESYPKSQMEKEDSQLFVPFQELAGESIKYLGRTDDGILALSNYRIFLSKQSTGYETYVPLGLIESVQVRDLFQLIVNCKDASTVRCSFPSAEQCSDWQRRIHLMIGVPESLETLFAFPFYSWTCDVLGSGNGSGIVSAQANGNGLIAKDRCLTLHNGLAKPTANVTASNPLPDPASETISAAMSNRLQRSVRYESDFKNEVARLGFDLKGSWRISTANADFKLCPSYPPKLLVPCCITDEMLHNVANFRGSRRLPAVVWRHQKSGAILARCSQPEVGWLGWRNTRDEQLLKALADACAFDRGEHARHSTCANAKAQPTKGSKETNGQSGLSGKSSPSLDDSSHEELTLDEIKKILIVDARSYTSAVTNRARGGGCECIEYYPCAEIEFMNLGNIHAIRKSFHAVRQLCASSPDDPNWYGQLEKTMWMQHLSGLLGATMTVVHTIEKNGRPVLVHCSDGWDRTPQIVATAQLCLDPYYRTVEGFRVLVEREWLNFGHKFADRSGNGPNSDEVNERCPVFLQWLDLVHQIHRQYPCSFEFSISYLIKLAQHSLSCLFGTFLCLMAKTRSSEDLTTNELGQSTISRRSSDPNLTVESINSMFDIRSEANNSVSENVQESVKDSKEVELDVTDATEKLNSESGRPFFIFGSSENDQSPVPLKSEDTSDISRALWHGAIETSTDTLIPAEPVQKPNSDNSSRDHITSPTMELVSGDRKLESTSTVQASKISQSYNNLPKVHIRPNAVICPQRVDAFPHHLDLQVPRETTGNPDRCKPEKLAKDANANANANGSLLASDGYNGEESLFISPDLQRFVGQSPFDAPSTGGRIRRNTFGSSYSRDMKFTAENGRKMDRISLKMLQHVPGRPSKNVVVPPRMPLPRFKRKKPPVSSGCQTMQFRVALVVKLSSGLDEENIIVDLVEKFFVLTARSFGRRCQTKSFLTQLGYVDPATRASRPMSRSTLRYLQNPRRRTMRRLLRFPKHFSFSQF

SEQ ID NO: 3 - DNA, 2766 bp, Drosophila melanogaster
  Name: CG3632
  AE003501
  GI: 10728281
  Transcript: CT13680
catacatatgtatgtgcaacaacatttgcaaatctttgtttataatagctgacgcttatggattttatggtggtaaatagagcgagaaaatctagaagccaagcgcgttttcaattcggcaatacgttttgagctaaataccccgaaaagtctgctgagcgaacgccgattcacacaatgtccgatggatcaccgcctccatcgatttgctttatccgtgccgccgaatcgtatccaaagtcacaaatggagaaggaagactcccagctgttcgtcccgtttcaagagttggccggcgaatcgattaagtacctggggcgcacggatgatggtatcctcgccctgtccaattatcggatattcctttccaagcagtcaaccggctacgagacctacgttccattgggattaatcgaatccgtacaggtgcgagatctgttccagctgattgtcaattgtaaggatgccagcactgtgcgctgctcctttccgtcggcggaacagtgctccgactggcagcgccggatccatctgatgatcggggttcccgagtcactggagacactcttcgcctttcccttctactcctggacctgcgatgtgctcggaagtggcaatggaagcggtatcgttagcgcccaggccaacggaaacggcctgattgccaaggatcgttgcctaacgctacacaatggcttggcaaagccaacagccaacgtcacagcgtcgaatcctctgcccgatcctgccagcgagaccatctcagccgccatgagcaatcgcctgcaacgatcagtgcgctatgaaagcgactttaagaacgaggttgcccgcttgggattcgatctgaagggctcgtggcgcatctccacggccaatgccgattttaagctctgtccctcgtatccacccaaattgcttgtgccctgctgtatcaccgatgagatgctccacaacgtggccaacttccggggatcacgaaggctgccggctgtcgtctggcggcaccaaaagtcgggtgccatcttggcccgatgcagccagccggaggtcggttggctcggctggcgcaacacaagggacgagcagctactcaaggcactcgccgatgcctgtgcctttgacaggggcgagcacgccaggcattccacctgcgccaatgcaaaggcgcaaccaacaaagggctccaaggagaccaacggccagtcgggcttatccggcaagagttcaccatctctggacgattcctcgcatgaggaactcacgctggatgaaatcaagaaaatcctcattgtggatgctcgcagctacacctccgcagttacaaatcgtgccagaggtggcggctgtgagtgcatcgagtactatccctgtgcagagattgagtttatgaacttgggcaacatccacgccattcgaaagagtttccacgctgtccgacagctatgcgcgtcatcccccgatgatccaaactggtacggacaactggaaaagaccatgtggatgcagcacctgtcgggtctgctgggagccaccatgaccgttgtgcacaccatcgagaagaatggacgacccgtccttgtacattgctcagacggttgggatcgcactccacagatcgtggccacggcgcaattatgtttggatccctactacagaacggttgaggggttccgcgttcttgtcgagcgtgaatggctgaactttggacacaaattcgccgatcgctctggaaatggtcccaattccgatgaagttaacgagcgatgtccagtttttctgcagtggcttgatcttgtgcatcaaatacacaggcagtatccatgcagttttgagtttagtataagctatttgatcaaactggcgcaacattcgttgtcctgtctcttcggcacgttcctatgcctcatggcgaagacacgatcttctgaagacttaacaacgaatgagttgggacagagcaccatttccaggaggtccagtgatcccaacctgaccgttgaatccatcaactcgatgtttgacatacgatccgaggccaacaacagtgttagcgaaaatgtccaagaaagtgttaaagactccaaagaagtagagctggacgtgacggatgcaactgaaaaactgaactctgaatctgggcgaccttttttcatatttggttcatccgaaaacgatcaaagtccagttcctttaaaatctgaagacacaagtgatatttctcgcgccctgtggcatggcgcaattgaaaccagcactgatacccttattcctgcggagcccgtacaaaaaccaaacagcgacaatagcagtagagatcacataacatcccccacaatggaactggtcagtggtgatagaaagctggagtcgactagcactgtccaagccagtaaaatcagtcagagctacaataatttgcccaaggtacacataagaccgaatgccgttatatgcccgcagcgggtagacgcttttccccatcacctggacctacaagtgccaagggagacgacgggaaatccggaccgttgcaagccggaaaagttagccaaagatgcaaatgcgaatgccaatgccaacggatccctgctggcatccgatggctacaacggcgaggaaagtctctttatatcacccgaccttcagcggttcgtgggccagtcgccattcgatgctccctcgacgggcggacgaatacggcgaaataccttcggctcgagctacagtcgcgatatgaagttcacggctgaaaatggcaggtga

SEQ ID NO: 4 - protein, 862 aa, Drosophila melanogaster
  AAF48584
  GI: 7293201
MSDGSPPPSICFIRAAESYPKSQMEKEDSQLFVPFQELAGESIKYLGRTDDGILALSNYRIFLSKQSTGYETYVPLGLIESVQVRDLFQLIVNCKDASTVRCSFPSAEQCSDWQRRIHLMIGVPESLETLFAFPFYSWTCDVLGSGNGSGIVSAQANGNGLIAKDRCLTLHNGLAKPTANVTASNPLPDPASETISAAMSNRLQRSVRYESDFKNEVARLGFDLKGSWRISTANADFKLCPSYPPKLLVPCCITDEMLHNVANFRGSRRLPAVVWRHQKSGAILARCSQPEVGWLGWRNTRDEQLLKALADACAFDRGEHARHSTCANAKAQPTKGSKETNGQSGLSGKSSPSLDDSSHEELTLDEIKKILIVDARSYTSAVTNRARGGGCECIEYYPCAEIEFMNLGNIHAIRKSFHAVRQLCASSPDDPNWYGQLEKTMWMQHLSGLLGATMTVVHTIEKNGRPVLVHCSDGWDRTPQIVATAQLCLDPYYRTVEGFRVLVEREWLNFGHKFADRSGNGPNSDEVNERCPVFLQWLDLVHQIHRQYPCSFEFSISYLIKLAQHSLSCLFGTFLCLMAKTRSSEDLTTNELGQSTISRRSSDPNLTVESINSMFDIRSEANNSVSENVQESVKDSKEVELDVTDATEKLNSESGRPFFIFGSSENDQSPVPLKSEDTSDISRALWHGAIETSTDTLIPAEPVQKPNSDNSSRDHITSPTMELVSGDRKLESTSTVQASKISQSYNNLPKVHIRPNAVICPQRVDAFPHHLDLQVPRETTGNPDRCKPEKLAKDANANANANGSLLASDGYNGEESLFISPDLQRFVGQSPFDAPSTGGRIRRNTFGSSYSRDMKFTAENGR

SEQ ID NO: 5 - DNA, 2699 bp, Drosophila melanogaster
  Name: CG3632
  AE003501
  GI: 10728281
  Transcript:CT13700
agagcgagaaaatctagaagccaagcgcgttttcaattcggcaatacgttttgagctaaataccccgaaaagtctgctgagcgaacgtattcttttagccgattcacacaatgtccgatggatcaccgcctccatcgatttgctttatccgtgccgccgaatcgtatccaaagtcacaaatggagaaggaagactcccagctgttcgtcccgtttcaagagttggccggcgaatcgattaagtacctggggcgcacggatgatggtatcctcgccctgtccaattatcggatattcctttccaagcagtcaaccggctacgagacctacgttccattgggattaatcgaatccgtacaggtgcgagatctgttccagctgattgtcaattgtaaggatgccagcactgtgcgctgctcctttccgtcggcggaacagtgctccgactggcagcgccggatccatctgatgatcggggttcccgagtcactggagacactcttcgcctttcccttctactcctggacctgcgatgtgctcggaagtggcaatggaagcggtatcgttagcgcccaggccaacggaaacggcctgattgccaaggatcgttgcctaacgctacacaatggcttggcaaagccaacagccaacgtcacagcgtcgaatcctctgcccgatcctgccagcgagaccatctcagccgccatgagcaatcgcctgcaacgatcagtgcgctatgaaagcgactttaagaacgaggttgcccgcttgggattcgatctgaagggctcgtggcgcatctccacggccaatgccgattttaagctctgtccctcgtatccacccaaattgcttgtgccctgctgtatcaccgatgagatgctccacaacgtggccaacttccggggatcacgaaggctgccggctgtcgtctggcggcaccaaaagtcgggtgccatcttggcccgatgcagccagccggaggtcggttggctcggctggcgcaacacaagggacgagcagctactcaaggcactcgccgatgcctgtgcctttgacaggggcgagcacgccaggcattccacctgcgccaatgcaaaggcgcaaccaacaaagggctccaaggagaccaacggccagtcgggcttatccggcaagagttcaccatctctggacgattcctcgcatgaggaactcacgctggatgaaatcaagaaaatcctcattgtggatgctcgcagctacacctccgcagttacaaatcgtgccagaggtggcggctgtgagtgcatcgagtactatccctgtgcagagattgagtttatgaacttgggcaacatccacgccattcgaaagagtttccacgctgtccgacagctatgcgcgtcatcccccgatgatccaaactggtacggacaactggaaaagaccatgtggatgcagcacctgtcgggtctgctgggagccaccatgaccgttgtgcacaccatcgagaagaatggacgacccgtccttgtacattgctcagacggttgggatcgcactccacagatcgtggccacggcgcaattatgtttggatccctactacagaacggttgaggggttccgcgttcttgtcgagcgtgaatggctgaactttggacacaaattcgccgatcgctctggaaatggtcccaattccgatgaagttaacgagcgatgtccagtttttctgcagtggcttgatcttgtgcatcaaatacacaggcagtatccatgcagttttgagtttagtataagctatttgatcaaactggcgcaacattcgttgtcctgtctcttcggcacgttcctatgcctcatggcgaagacacgatcttctgaagacttaacaacgaatgagttgggacagagcaccatttccaggaggtccagtgatcccaacctgaccgttgaatccatcaactcgatgtttgacatacgatccgaggccaacaacagtgttagcgaaaatgtccaagaaagtgttaaagactccaaagaagtagagctggacgtgacggatgcaactgaaaaactgaactctgaatctgggcgaccttttttcatatttggttcatccgaaaacgatcaaagtccagttcctttaaaatctgaagacacaagtgatatttctcgcgccctgtggcatggcgcaattgaaaccagcactgatacccttattcctgcggagcccgtacaaaaaccaaacagcgacaatagcagtagagatcacataacatcccccacaatggaactggtcagtggtgatagaaagctggagtcgactagcactgtccaagccagtaaaatcagtcagagctacaataatttgcccaaggtacacataagaccgaatgccgttatatgcccgcagcgggtagacgcttttccccatcacctggacctacaagtgccaagggagacgacgggaaatccggaccgttgcaagccggaaaagttagccaaagatgcaaatgcgaatgccaatgccaacggatccctgctggcatccgatggctacaacggcgaggaaagtctctttatatcacccgaccttcagcggttcgtgggccagtcgccattcgatgctccctcgacgggcggacgaatacggcgaaataccttcggctcgagctacagtcgcgatatgaagttcacggctgaaaatggcaggtga

SEQ ID NO: 6 - protein, 1001 aa, Drosophila melanogaster
  AAF48582
  GI:7293199
MSDGSPPPSICFIRAAESYPKSQMEKEDSQLFVPFQELAGESIKYLGRTDDGILALSNYRIFLSKQSTGYETYVPLGLIESVQVRDLFQLIVNCKDASTVRCSFPSAEQCSDWQRRIHLMIGVPESLETLFAFPFYSWTCDVLGSGNGSGIVSAQANGNGLIAKDRCLTLHNGLAKPTANVTASNPLPDPASETISAAMSNRLQRSVRYESDFKNEVARLGFDLKGSWRISTANADFKLCPSYPPKLLVPCCITDEMLHNVANFRGSRRLPAVVWRHQKSGAILARCSQPEVGWLGWRNTRDEQLLKALADACAFDRGEHARHSTCANAKAQPTKGSKETNGQSGLSGKSSPSLDDSSHEELTLDEIKKILIVDARSYTSAVTNRARGGGCECIEYYPCAEIEFMNLGNIHAIRKSFHAVRQLCASSPDDPNWYGQLEKTMWMQHLSGLLGATMTVVHTIEKNGRPVLVHCSDGWDRTPQIVATAQLCLDPYYRTVEGFRVLVEREWLNFGHKFADRSGNGPNSDEVNERCPVFLQWLDLVHQIHRQYPCSFEFSISYLIKLAQHSLSCLFGTFLCLMAKTRSSEDLTTNELGQSTISRRSSDPNLTVESINSMFDIRSEANNSVSENVQESVKDSKEVELDVTDATEKLNSESGRPFFIFGSSENDQSPVPLKSEDTSDISRALWHGAIETSTDTLIPAEPVQKPNSDNSSRDHITSPTMELVSGDRKLESTSTVQASKISQSYNNLPKVHIRPNAVICPQRVDAFPHHLDLQVPRETTGNPDRCKPEKLAKDANANANANGSLLASDGYNGEESLFISPDLQRFVGQSPFDAPSTGGRIRRNTFGSSYSRDMKFTAENGRKMDRISLKMLQHVPGRPSKNVVVPPRMPLPRFKRKKPPVSSGCQTMQFRVALVVKLSSGLDEENIIVDLVEKFFVLTARSFGRRCQTKSFLTQLGYVDPATRASRPMSRSTLRYLQNPRRRTMRRLLRFPKHFSFSQFI

SEQ ID NO: 7 - DNA, 2758 bp, Drosophila melanogaster
  Name: CG3632
  AE003501
  GI: 10728281
  Transcript:CT13718
cgataatcggccatttttcgcctattggctatgaaatcgtgataatctagtctattggtatatatgtgcgtgcgtatgtaatgcagcgacacacaaatatgtgcatactatatattgcgcaccttgtggaactgcaactgtgtgtgctcacataaatccgattcacacaatgtccgatggatcaccgcctccatcgatttgctttatccgtgccgccgaatcgtatccaaagtcacaaatggagaaggaagactcccagctgttcgtcccgtttcaagagttggccggcgaatcgattaagtacctggggcgcacggatgatggtatcctcgccctgtccaattatcggatattcctttccaagcagtcaaccggctacgagacctacgttccattgggattaatcgaatccgtacaggtgcgagatctgttccagctgattgtcaattgtaaggatgccagcactgtgcgctgctcctttccgtcggcggaacagtgctccgactggcagcgccggatccatctgatgatcggggttcccgagtcactggagacactcttcgcctttcccttctactcctggacctgcgatgtgctcggaagtggcaatggaagcggtatcgttagcgcccaggccaacggaaacggcctgattgccaaggatcgttgcctaacgctacacaatggcttggcaaagccaacagccaacgtcacagcgtcgaatcctctgcccgatcctgccagcgagaccatctcagccgccatgagcaatcgcctgcaacgatcagtgcgctatgaaagcgactttaagaacgaggttgcccgcttgggattcgatctgaagggctcgtggcgcatctccacggccaatgccgattttaagctctgtccctcgtatccacccaaattgcttgtgccctgctgtatcaccgatgagatgctccacaacgtggccaacttccggggatcacgaaggctgccggctgtcgtctggcggcaccaaaagtcgggtgccatcttggcccgatgcagccagccggaggtcggttggctcggctggcgcaacacaagggacgagcagctactcaaggcactcgccgatgcctgtgcctttgacaggggcgagcacgccaggcattccacctgcgccaatgcaaaggcgcaaccaacaaagggctccaaggagaccaacggccagtcgggcttatccggcaagagttcaccatctctggacgattcctcgcatgaggaactcacgctggatgaaatcaagaaaatcctcattgtggatgctcgcagctacacctccgcagttacaaatcgtgccagaggtggcggctgtgagtgcatcgagtactatccctgtgcagagattgagtttatgaacttgggcaacatccacgccattcgaaagagtttccacgctgtccgacagctatgcgcgtcatcccccgatgatccaaactggtacggacaactggaaaagaccatgtggatgcagcacctgtcgggtctgctgggagccaccatgaccgttgtgcacaccatcgagaagaatggacgacccgtccttgtacattgctcagacggttgggatcgcactccacagatcgtggccacggcgcaattatgtttggatccctactacagaacggttgaggggttccgcgttcttgtcgagcgtgaatggctgaactttggacacaaattcgccgatcgctctggaaatggtcccaattccgatgaagttaacgagcgatgtccagtttttctgcagtggcttgatcttgtgcatcaaatacacaggcagtatccatgcagttttgagtttagtataagctatttgatcaaactggcgcaacattcgttgtcctgtctcttcggcacgttcctatgcctcatggcgaagacacgatcttctgaagacttaacaacgaatgagttgggacagagcaccatttccaggaggtccagtgatcccaacctgaccgttgaatccatcaactcgatgtttgacatacgatccgaggccaacaacagtgttagcgaaaatgtccaagaaagtgttaaagactccaaagaagtagagctggacgtgacggatgcaactgaaaaactgaactctgaatctgggcgaccttttttcatatttggttcatccgaaaacgatcaaagtccagttcctttaaaatctgaagacacaagtgatatttctcgcgccctgtggcatggcgcaattgaaaccagcactgatacccttattcctgcggagcccgtacaaaaaccaaacagcgacaatagcagtagagatcacataacatcccccacaatggaactggtcagtggtgatagaaagctggagtcgactagcactgtccaagccagtaaaatcagtcagagctacaataatttgcccaaggtacacataagaccgaatgccgttatatgcccgcagcgggtagacgcttttccccatcacctggacctacaagtgccaagggagacgacgggaaatccggaccgttgcaagccggaaaagttagccaaagatgcaaatgcgaatgccaatgccaacggatccctgctggcatccgatggctacaacggcgaggaaagtctctttatatcacccgaccttcagcggttcgtgggccagtcgccattcgatgctccctcgacgggcggacgaatacggcgaaataccttcggctcgagctacagtcgcgatatgaagttcacggctgaaaatggcaggtga

SEQ ID NO: 8 - protein, 1001 aa, Drosophila melanogaster; identical to SEQ ID NO: 6
  AAF48581
  GI:7293198

SEQ ID NO: 9 - DNA, 1683 bp, Drosophila melanogaster
  Name: Pp1-87B
  AE003695
  GI: 7299572
  Transcript: CT17842
gcagtgtggcaacatcagctagaagcacactcgccatcccgcccgcactcacgcaacagcatacgaagaaattttcatacttgttagctgtgaaaagtatttagcagaaatagatttcggaaattaaagatttcgaggctatttcggcgctaccaacgatcgttcgcggtaacctcgacacccaacagcagcactagtgcaccagatccacactttcgcacgcaaacatgggcgacgtgatgaatatcgacagcataatatcgcgacttctcgaggtgcgtggggcacggccaggtaaaaacgtacagctctcggagggcgagatccggggactttgcttgaagtcgcgcgagatcttcctgtcgcagcccattctgctcgagctagaggcaccgttgaagatctgcggcgacatccatggacagtactacgatctgttgcgtctgttcgagtacggcggctttccgccggaatcgaattacctgttcctcggcgactacgtcgatcgcggcaagcaatcgctggagacgatctgcctgctgctcgcctacaagatcaaatactcggagaatttcttcctgctgcgcggcaaccacgaatgcgccagcattaatcgcatatacggattctacgacgaatgcaagcgtcgctacagcatcaagttgtggaagacattcacggactgcttcaactgcctgccagtggcggccattgtcgacgagaagatcttctgctgccacggtggtctcagtcccgatttgacctccatggagcagatccgtcgcattatgcggccaaccgatgtgcccgaccagggactgctgtgcgatctcctgtggtccgatcccgataaggataccatgggctggggcgaaaacgaccgcggcgttagcttcaccttcggtgccgaggtggtggccaagtttttgcagaagcacgagttcgatctcatctgccgagcccatcaagtcgtcgaggatgggtacgagttctttgccaaacgcatgctggtcaccctgttctcggcgcccaactactgcggcgagttcgacaatgccggcgccatgatgtccgtggacgatacgctgatgtgctcgttccaaatcctcaagccagccgacaagcgtaaaaagtaatatcacacaactgcagcaccacgagcagtctttttctatctaaaacagatcaataagaaatccaaacaagatacaaaagataaacacgacaaaaacaaccacaaacccaaccacacaatcaaccagaaataaaatcctttgaaacaacacatcaaatgatgcatgaaacccggggcgagtcgaaatccacaagaaattgcaccattaatttggtatggaatagcagcgccacgatcaaaggacatccccagagacatcccttccagcagatgactgcagttttccccttccaccccacacccattgagatttaaatcgcaattacaaacacattgacaaataccatgattaaaagccacatatttatttgtaatagcccccgtatatatatatatatatgtatatctaccgaccgaccaaccattcacccacgcacacacatgtacacacatttgaacaccagcgcttttataggttttgtccaaaatttaaacactaggttaatcaactgaccgttcgagcagagcaccaagcgcataaccatgca

SEQ ID NO: 10 - protein, 302 aa, Drosophila melanogaster
  AAF54810
  GI:7299625
MGDVMNIDSIISRLLEVRGARPGKNVQLSEGEIRGLCLKSREIFLSQPILLELEAPLKICGDIHGQYYDLLRLFEYGGFPPESNYLFLGDYVDRGKQSLETICLLLAYKIKYSENFFLLRGNHECASINRIYGFYDECKRRYSIKLWKTFTDCFNCLPVAAIVDEKIFCCHGGLSPDLTSMEQIRRIMRPTDVPDQGLLCDLLWSDPDKDTMGWGENDRGVSFTFGAEVVAKFLQKHEFDLICRAHQVVEDGYEFFAKRMLVTLFSAPNYCGEFDNAGAMMSVDDTLMCSFQILKPADKRKK

SEQ ID NO: 11 - DNA, 7590 bp, Drosophila melanogaster
  Name: CG3524
  AE003581
  GI: 10727365
  Transcript: CT11835
tcggatctatacgtgcccaccaaaaggatatacaaccacacccaactagaaggacctactagcccagctgacatcctggttgtcccgcaaaacgcacggcacattcgaaaaggatacgcgatcagtgaacccaagtgaataaggtgccgtccaaaaacgatacgatccgaattagtggcatacgaaatatccttgtatatttgggccctcatacagactgagccagaacaaagaaaaaacgccgaaatgccgagcaggaagaaagcccagggggaatcggccgctggtgaggatgcggacattgtgatctcgggactttccgggaagctgccggagagcagcaacatcgaggagttcaagtacaacctgctcaacggcatcgacatggtcacagatgagccgcgccgttgggaggcaggcatctatggactccccgagcgtatggccaaaatgaaggactccgatctggagaagttcgacgacaagttctttagcgtccaccagaagcaggcggagctgatggacccctgcatgcggatgctgctggagctgacccacgaggcgatcatcgatgcgggcatcaatcccgtacagctgcgcggcagtcggacgggcgtctacataggcctgtcctttgtggagacggagcacgagatccccaacatggagccgagcagtatcaacggctactgcctgacgggctgtgcgcgtgccatgttcgccaatcgcatctcctacacgttcgacttcaaggggcccagctttatcgtggacaccgcatgctccagctcgctggtggcccttaaccacgccttcgcggacatgcgggcgggtcgctgtgattacgccctggttgcgggcgtgaatctcatcctaaagcccatctttgccctccagttcctcaggctgggcatcgtgagccacgacggctcctgcaagaccttcgatgcggcggccaacggctatgcccgggcggacacctgcgccgttgtgctgctccagaggcgtaaggaggccaagcgggtgtacgccagcatcctaaatgttcggaccaatacggacggattcaaggagcagggcgtaaccttcccagacggccgcatgcagcaggccctgctggaggagacctacagcgagatcggcctcaatccggacgaggtggtctacgtggaggcacacggcagcggcacaccggtgggcgatgaccaggaagccaacatgctgagcaacttcttctgtcgcccctcgcgatccactccgctgcttattggctcagtgaagtcgaacatgggtcacgcggagccagcctcgggagtgagtgccctggccaagatgatcatcgccatggaggagggcattattccgaagaatctgcactatcgcacgcccaatccttcggttccggctctggtcgagggtaagcttaaggtggtggatcgcaatcttccctggcagggtggcattgtgggtctgaactccttcggctttggaggagccaatgcccatgtggtactaaagtcgcacactaaagccaaagagcctaaggcatgcccgaaggctggggaggccgaacagtccctgagtctagttacctgttctggccgcacggaggatgcagtgaatcagttgctgaaagttgccaccgagcagaggcacgatcaggagctgctgaccctcatcaatgacatccactcacatcctattcccctgcatccgttcaggggatacgctgttctcggtaccagcggatgcgttaaggaggaggtgctgccctacgaggaggaggagcgacccatctggttcgtctacgccggcatgggcagtcaatgggccaggatggctaaggatctcatgcagctggaggttttccggaactccatacagcactgcgccgaggttctggcccaggtggactttgatcttatagacgtgcttacccgttccacggagcgaacctttgacaatatgctctactcctttgtctccgtgtccgccgtgcaggtggcgttgacagatcttctccgggtgctggacatacgaccagatggaatcattggccattcggctggtgagctgggggcagcctacatggacggatgtctaacggcggagcaaacagttctggccgcctattggcgcggcaggagcgtcctggacactccggacttgccgcgcggaaagatggctgctgtaggtttgagctgggagcagatcggatcacagatcccaaaggattgctatccggtgtgtcacaacagtgatgacaattgcacggtctccgggccaccgtcatccatggacgcgatgatagaggacctcacggcaaagggaattttcgtgagagaggttggctctggaggctatgctttccacagtccgtacattgaaggagcggctcccatgctgcgtagaagtctggagcgactgatcacggagcccaagaagaagagtattcgatggcttagtactagtgtgaaagaagcggagtgggactcggagaaaaaccacctggcatcggctggctactttataaacaacctcatatcccccgtgctctttcatcaagctgtcaagcggattccccaaaacgctctcatcgtggagatcgcaccccatggactcttcagggcgattctccgatccttaagtccgcagattagctatgtgagtctgatgcagcgaggtcatgccaataactttgagttcttgctgagccagttgggcagactctacgctgccggagggcagccgcagatcctgaagatctccccttccatcccctatcccgtttcccgtggcactcccatgctgggctccttagtgggctgggatcacacacagaagtggaactaccccaagttcaagggcggcagacaggcgggacagcttagtgtggagctagatttgggcaaggaggaaaacgtctatctagcggggcacacgatcgacggcagagtcttgttccccgcaaccggctacatgaccctggcctggatgagtctggcccaacagcagggattggactacttgcgcacgcccgtgctattcgaggatgtggtcttccatcgggccacgatccttagcgtgggcactgtggtaaaactaacactcaacttctttccgggcagcagctcctttgaaatctgtgaaggcacaagcctggtgacatcgggcaagatccgtctggtgagcaatgtgcagcaggagcagcttcagctgtcatctctaccgggaatcgccggctccaacaagctgagcaccaaggacatttacaaggagctaagacttaggggctacgactacactggtgttttccagggcattttggagtcggatatttcggcggtgacgggtcagctgcagtgggctgacaattggatcagttttatggacaccatgctgcagtttcgcatcctgagcaatgatatccgagaactgtacgtgcccacgggaatagagagggcactgatagatcctctcaagcacctggagctggcaaagaagcaccaacagaagttaactgtcaactggcatcgcaacatttccgtagtcaagtgcggtggagtggagatacacaagatgaagaccgcccagacccaaaggcgttctggtggccaatctccacccagcttggagcgctatagattctggcctcattcccagcacttgggtcagcgggaggagcaggaaaagtcaaggagcacagctctagcggtggccattcaattgatcatcgagaacagcggtggagctgtaaagctcaagggcgtggaactggctggatcccggtccactttggatgcgctgagtgccgtccagcttctcgagctgatcgaaagggaaccgattctggtgggcgacatggcggtggttaccagctcctccaatgaatccgaactgggtgagcagctcaaggagcacggtattcgggtgatagtcaaggatatcaaagctggtgcggtggagcagcaatgccatttcgtgtactctgtgaatatgctagcccagaactctgtcaaggatctgcagcactgcttggatagtctgaagtccgattcgggattcctgctcctggaggaagcagccagcaggtataacattataggaaaggagaagttgaacaaacttaagctggtttcagttttggagcagttcttcggtacagatcgagtgcttgtcctagtcagaaaactatcgaaggtgcaatccagccaagccctgacacttcacctcaccaataaacagttcaagtgggtcaacgagctaaaaaactctattgcaaaggcccaagctgaagagaaaaacctctacttggtggcccagggtgaacccaattcaggagctttgggcttgatgaactgcctgaagagggaagctggagggcatttcctacggctataccttattctggatgaaggtgtgccccagttctccctggacgatcccttctacgccgcacagttggccaaggatctggtcgtcaatgtctacagaaatggaagctggggtagctaccgtcacctgaagatggaatcccggccgcccatgctgccagtggagcaggcgtatgtgaacaccctggtcaagggggatctctcatcacttcgctggatcgagagtcctcgttccagtcccatccagtcgcaattggagccctgcaccgtttactatgctccgctcaatttccgggatgtgatgttggcctccggtaaactgggagtggatgctctgcctggggatctggcctaccaggactgtgtccttggtctggaattcgctggcagggattcgtgcggccgtcgtgtaatggcaatggttactgccaaatctttggccaccaactgcttggccaacaggaatctcctctgggaagtcccatctaagtggaccatggagcaggcttcgaccgttccctgtgtttatgccaccgtttattacgctttggtggtcaggggccaaatgaaggagggtgaaaggatcctcatccacgccggctctggaggagttggtcaggcggccatttcggtggctttggctcacggactgactgtcttcaccactgtgggcagcaaggagaagcgggagttcctgctgaagcgattccccaagctgaaagctaagaatattggcaattcgcgagacacctctttcgagcaattgatcatgagcgaaacccacggaaatggagtggaacttgtgctgaactctctctccgaggagaagctgcaagcctccattcgctgtctggctttgaatggccgcttcctggagatcggcaagtttgacttgagcaacaacactccgctagggatgtcggtgttcctcaagaacacctccttccacggaatccttctggacagcgtgatggagggggaggaggagatgcagctaatggttgccaagttggtggcggagggtatcaagagtggagcagtgcagccgctgcctaccacagtctttgcagagcaggagatcgagaaggcgttccgtttcatggcgtccggcaaacatattggcaaggtggtgatcaaggtacgtttggaggaggaacagcaggcggctctcccgcgacttaggcaaattcaggccataccgcgctcctacatgcacccagagaagagctacatcttggtggggggacttgggggattcggtctggagctggccaactggctagtttccagaggagcccgctttctggttctgagctctcgctctggggtgaagagcgggtaccaggccctgatgattcgtcgctggcacgaccgtggagttcaggttcagatcgataccaacgatgtgaccaccgctgttggctgccagagactcctagaggttagtaataagctggccctggttggaggtatctttaacctcgcggctgtactacgggatggactgatcgaagatcaaagcccgaagaactttgaaaaggtaagtgcaccgaagctactggccaccatacacttggacaagatctcccgggaaatttgtcctgcactggagtacttcgtgtgcttctccagcttgtcctgcggcaggggaaacatgggacagaccaactatggactggcgaactccacgatggaaaggatatgcgagcagcggcaggaatatggttatccgggcacagcgattcaatggggagcaattggggacaccggactgatcatcgagcacatgggcaacaacgaaacagttgtgggcggcactctgccgcagcggatgatcagctgtctggagactctggacctatttctgcagcagccccatcccgtcatggcctccatggtggtggcggaaaaacgcaagacggagcaggccaaccggctgagcttgatagccacgatcgcgaatatcatgggactgagggatgtaaagagtgtctccgataagaccaccctcttcgatcttggcatggactcgctgatgagcacagagatcaagcagacgttggagcgtcactttgacctggtgctgagcgcccaggagatccgccagctaacctttagcgccctgcgccagatagacgcccaggaaccgccctccgcttcagtctcatcgccctcagcctcttccaccctatcaaggatcaaggaggaggcctgcgtggaggtccagccccagagcgatgagacgcgcaaggtattcgccaaggaagtattaccccaggaggtgatggtgcgccttcggtcaaaggcgcccgtggccagcgaggatccggctgtgttcttcttggctcccatcgagggattcacaatagccgtggaggcgctggccgcctcgctcacctgccccgcctacgggctgcagtgcacggagcaagtgcccctggactccatcgaggcctgtgccgcctactatctgcgccagatccagaagctccagcccctcggaccgtaccacatcgtaggctactcctacggctgcctgctcgcccacgccattgctgtggcgctggagcagcgccgcttcggggtcaaggtcatcatgctggacggagcgcccaccatggccagcggctatgtccaggaggccaagaagcagacggacgacctcaaccggcagcagtccatgacgttggcctactttggagctctgctcgccgacgtggattacaaccagctactgcaactcctcgatggagtccagacatggccctccaagctcgacaaactagcagacactctggctggttacacgcagcaaaccagagaagtgatcaagaaggccgcctgcatgttcaaacagaagctgctactttctgagagctacaagggcgccaagcagctccacagcgatgtggtcttgatcaagtcggccgagcacaatgcgattatggcccaggactatggcctcaaggagatttgcagtgcccagatcgacatgcatgtggtggagggtacacacaggaccttcctcaaggagccgcacactctacagatcatcgagcgcgtcctgcggaagcgtccctagtggaagggaagtagttcgtacgattatgctgatgaattatcctgtagaacttaatgtacatataccctaatcctatcaatacacgtagcaatcgcgcattgattgtttaagaat

SEQ ID NO: 12 - protein, 2409 aa, Drosophila melanogaster
  AAF51149
  GI:7295849
MPSRKKAQGESAAGEDADIVISGLSGKLPESSNIEEFKYNLLNGIDMVTDEPRRWEAGIYGLPERMAKMKDSDLEKFDDKFFSVHQKQAELMDPCMRMLLELTHEAIIDAGINPVQLRGSRTGVYIGLSFVETEHEIPNMEPSSINGYCLTGCARAMFANRISYTFDFKGPSFIVDTACSSSLVALNHAFADMRAGRCDYALVAGVNLILKPIFALQFLRLGIVSHDGSCKTFDAAANGYARADTCAVVLLQRRKEAKRVYASILNVRTNTDGFKEQGVTFPDGRMQQALLEETYSEIGLNPDEVVYVEAHGSGTPVGDDQEANMLSNFFCRPSRSTPLLIGSVKSNMGHAEPASGVSALAKMIIAMEEGIIPKNLHYRTPNPSVPALVEGKLKVVDRNLPWQGGIVGLNSFGFGGANAHVVLKSHTKAKEPKACPKAGEAEQSLSLVTCSGRTEDAVNQLLKVATEQRHDQELLTLINDIHSHPIPLHPFRGYAVLGTSGCVKEEVLPYEEEERPIWFVYAGMGSQWARMAKDLMQLEVFRNSIQHCAEVLAQVDFDLIDVLTRSTERTFDNMLYSFVSVSAVQVALTDLLRVLDIRPDGIIGHSAGELGAAYMDGCLTAEQTVLAAYWRGRSVLDTPDLPRGKMAAVGLSWEQIGSQIPKDCYPVCHNSDDNCTVSGPPSSMDAMIEDLTAKGIFVREVGSGGYAFHSPYIEGAAPMLRRSLERLITEPKKKSIRWLSTSVKEAEWDSEKNHLASAGYFINNLISPVLFHQAVKRIPQNALIVEIAPHGLFRAILRSLSPQISYVSLMQRGHANNFEFLLSQLGRLYAAGGQPQILKISPSIPYPVSRGTPMLGSLVGWDHTQKWNYPKFKGGRQAGQLSVELDLGKEENVYLAGHTIDGRVLFPATGYMTLAWMSLAQQQGLDYLRTPVLFEDVVFHRATILSVGTVVKLTLNFFPGSSSFEICEGTSLVTSGKIRLVSNVQQEQLQLSSLPGIAGSNKLSTKDIYKELRLRGYDYTGVFQGILESDISAVTGQLQWADNWISFMDTMLQFRILSNDIRELYVPTGIERALIDPLKHLELAKKHQQKLTVNWHRNISVVKCGGVEIHKMKTAQTQRRSGGQSPPSLERYRFWPHSQHLGQREEQEKSRSTALAVAIQLIIENSGGAVKLKGVELAGSRSTLDALSAVQLLELIEREPILVGDMAVVTSSSNESELGEQLKEHGIRVIVKDIKAGAVEQQCHFVYSVNMLAQNSVKDLQHCLDSLKSDSGFLLLEEAASRYNIIGKEKLNKLKLVSVLEQFFGTDRVLVLVRKLSKVQSSQALTLHLTNKQFKWVNELKNSIAKAQAEEKNLYLVAQGEPNSGALGLMNCLKREAGGHFLRLYLILDEGVPQFSLDDPFYAAQLAKDLVVNVYRNGSWGSYRHLKMESRPPMLPVEQAYVNTLVKGDLSSLRWIESPRSSPIQSQLEPCTVYYAPLNFRDVMLASGKLGVDALPGDLAYQDCVLGLEFAGRDSCGRRVMAMVTAKSLATNCLANRNLLWEVPSKWTMEQASTVPCVYATVYYALVVRGQMKEGERILIHAGSGGVGQAAISVALAHGLTVFTTVGSKEKREFLLKRFPKLKAKNIGNSRDTSFEQLIMSETHGNGVELVLNSLSEEKLQASIRCLALNGRFLEIGKFDLSNNTPLGMSVFLKNTSFHGILLDSVMEGEEEMQLMVAKLVAEGIKSGAVQPLPTTVFAEQEIEKAFRFMASGKHIGKVVIKVRLEEEQQAALPRLRQIQAIPRSYMHPEKSYILVGGLGGFGLELANWLVSRGARFLVLSSRSGVKSGYQALMIRRWHDRGVQVQIDTNDVTTAVGCQRLLEVSNKLALVGGIFNLAAVLRDGLIEDQSPKNFEKVSAPKLLATIHLDKISREICPALEYFVCFSSLSCGRGNMGQTNYGLANSTMERICEQRQEYGYPGTAIQWGAIGDTGLIIEHMGNNETVVGGTLPQRMISCLETLDLFLQQPHPVMASMVVAEKRKTEQANRLSLIATIANIMGLRDVKSVSDKTTLFDLGMDSLMSTEIKQTLERHFDLVLSAQEIRQLTFSALRQIDAQEPPSASVSSPSASSTLSRIKEEACVEVQPQSDETRKVFAKEVLPQEVMVRLRSKAPVASEDPAVFFLAPIEGFTIAVEALAASLTCPAYGLQCTEQVPLDSIEACAAYYLRQIQKLQPLGPYHIVGYSYGCLLAHAIAVALEQRRFGVKVIMLDGAPTMASGYVQEAKKQTDDLNRQQSMTLAYFGALLADVDYNQLLQLLDGVQTWPSKLDKLADTLAGYTQQTREVIKKAACMFKQKLLLSESYKGAKQLHSDVVLIKSAEHNAIMAQDYGLKEICSAQIDMHVVEGTHRTFLKEPHTLQIIERVLRKRP

SEQ ID NO: 13 - DNA, 5504 bp, Drosophila melanogaster
  Name: CG9311
  AE003533
  GI: 10727923
  Transcript: CT26513
aaacggccacactgcaacatttttcataaaacaatcttgttttgatattggtaaattaattgccagcaattagtttaaattgtgtgtaaaataaaaggccaactgggcaggcaacaagtaaactaatcaccatggaggcggtgccccgtttgcatatgctctggttcgccctaaaatcgagtcccgagggaacctcctttgcggctttgaaaaagtacatcgcggaattttatcatgaagatccagaggcttactccaaagaggtccatgccctggagactttgcgcaaccaggccatgcacaccacgaaagatggagcgccggtgatgaaacgctactattgccagctacacgcccttcagaatcgatttccacagctggcggatcgcggaatcttcacctttaaatggaaggatctctatcacagtgccgttcacgaggtcactgatctgcgattcgaacgggctgcggtgctgttcaacattgccgcattgcacactcagtccggagcgtcggtgacccgtggcgatgtggatggaatgaagatggcctgcactcacttccaggcggctgcttgggcctatggagagctgagagaacgctatgccaatgtcaatggcggaggggattttatgaccccagagctgctggtctttcagcaacaggtgtgctttgcccaagctcaggaatgcatactcgagaagtcgctaatcgacaataggaaaccgcatattgtggccaaagtgacggcgcagattgtggtttactatggagctgcactggctgctcttcttacgggaggagatgatggtccagtggctcaagtcatcgatagttctgtgtacaaactgtggaagaagtacgttcgcttcaagatcaactatctcacctgcatattgtacctataccagggccaacattccgaggagaagcgtcagatgggcgaaagggtgacgctctaccaggcttcctgggacaaactggaggaggcgcgcaaagagtccaagggccttcctgaccagcgggaaatcaatgaatccctcagcttcaccgctgatgtggtggaagcaaagcgcaaaaatgccaaaaacgaaaatgagttcatttaccatgaggcggtgcccgaattgtccaccattgcagccgtccaaggtgccaatttggtcaatgggattggctttcaagtaagcgacgaggagcacgcgggtccagacatctttgccagattagtgcccatgaaggcccacgaagccagctcgttgtacagcgaagagaaagccaaacttttgcgtaagtacggagctctgctggaggagaaggacacccaactggagtcgtacatgagctccctcaccctggataatctgaatatcaacgaggagcaagccaataagttgccccagggcatcgtggatcgctgtgccgccttaaatgcaaacaagactgctatcagcgatcttgtagaggccatgtctcagctggctgagattacagccgatgtggagaccaacctgggcgagatttcaagcatgctggaggcagaagccaaagcggagcgagagttccaatccgccaccggcgttcaacgaacaccaaatgcccacattaccgagttatcgcgagagttccagaaatacagtgaagcccatgcacgggcaggggaatccaataataccttgcggaaagccatgagcctgcacgtaaataatctaaagatcctggccagaccattgcctgagattcagcaactgatgcccaaactaagttcggaactgaataccaccgaaattttcagggatgtgaagctcatcctcaacaaagtcaacgaaatgaaggcgcaacgtgctcagtttcatgcggatttgaggatagccatcaatgaggatgatatcactggcaaagtaattgcccacggtggacaggagggcctccaagctttatttgcaaccgagctgggcaagcacgacaagatcaccgaacttctcgatcagaatatggtggctcaaggtaatattctgcaagctctaactgaaaactatgccaaggcggcaccagttttgaaaacgctccaggacgtgaagcagaaacgggagcacttttacagctcgctagctgcatcctatgatgtttatgaggatctgctggccaaatccgccaagggcttggaattctacaagaaactagccggaaatgtacagaagctacttaccagatttcgatccgccagggatgtacagtccgaagagcgccagcaaaggatgcagagcgttaaggccgcaacaactccagttgtcagcaaaccaatagcggaaactacgcctgtgccagcggtgagcagcacccccaaattaagggattacctcaaggccaaggcagcgatggcggatgcctcgaatcccgcctatgtgcctacagtgcgtccagtgccggtgggctcggagaatcccacgcaggccgcttgttcctatgccactgcaccaccgaatgagccacctccaccctatagtctcacacagcagcagtattttgatcccagtgccgccggctacacgaatcccatgtatcagcagcaacagcagcacattgctccaccggcctacaaggcccaagcatcgccaaactctcagaccctccacggagcgctcggtcagatgaatttgcagggccagtcgcaggataacaaccaagcaggcatggcttataattacgggtatccaagtgggtctgttcctcctctagcttacgctccacccggaacagtgcccgcaagctcagcttcccagggattgaatatccagcagcctctgtatgtggctacatcgggcaatccagtttcggtttcaaatcccagtgagctgccgtccaccctgcaggcacccttcgtggtcaatccaatgtccaatccctaccaaacagcggcaggttattcagggcaggcttaccaacaggtcaatgctcaagctcaacaggtgacttatcctacagcaccatcgggctcttcaacaggacaatcagctcaacagcccttgggttatgcgccaagtcaggggccacagcagcaagctggtggatatccacaatctcagacaccgcagcaacaggtgggagcttatcaacagcagccattatcaggctatgcccaacagctgacgcctcagcaacaaactggatattcacagtcgcaagcaccgcagctccaagcgcccagctatgcccaaaatcagcaatcgactggacaagcacagcagcaacagactggatatccacagacacctcaacaacatctagctgggtatgctcagtcccagcaacaggctacaggatatccacaatcgcagacatcgcagcagcagaccaccgggtattcccagtcccagacgcctcaacaaccactggcatatcagcagcaaccatctggttatccacaacaacaacaacagcagtcacttgctccgcaacagccatcactttatccatcgcaggctgtccaggcgtcgccacaacctattcctggccagcaggcaacacctccgaatgctgggcaacctttgccatatccacagcagtacactgatcccaatgcagctccagctccagctcctggggtttcttctgtaccaagtcctgttccagtaccgactccagcccccacttcatctcaagctcaggttcccacatctccgcatccttcggccacctacaccagctattccaaccatcctggctatagctttaatccgcagacaggtaaatacgagtacagcagtggctatcagcaggataccagttcgttgaagggatcccaagcctcgcaaagctaccagtttagccagagtggcaagcagcagtcggtgggaacaacggactcagagattgccagtcgcagcaataccgccactggattcgattcacctatcgtgtcccacaccaaggttaatatggcagctaaggactccacttctgcgatagagggcaatgagtcatccaactactactccactccctatggataccttggcagtgtaaatccgcagcaacaacccactcctgcgcctccttcgaattcaactgcttcaatttatatgcaaagtggagcgagcagcactgctgaaacccagacgacttccagcggagttccttacgcctcctccgcggctttgaccaaagtagaaccaaagccggaggcattgcctcccaaggttaccagcaatgtggatctgcttagcgacctggacattgactgctccgttgctgttccgccgccaatgttgccgcagcctgttttgcagccccaggtggtggccactcctacgccgccggcaagtcaggtatcggtgcctgttaaggtagaaagtgtggcagagcacgctgctcccgcaacagcggaaattcctgtagcagccaccgagggaactgctcaaactccagttaccattccttcgggtccgaagtgtgccagtttagataacctatccaactgttccgacctaagttccctggagaactttgactgggactcggaggtggagagctatgaaaaattactagagaatttgcacgtgaaaatgttgaatggaaaaacacaactgggcgccaaatggcaagagctgcagcaaaagttggataaagaagccgctgccaacaagcgatccaccaccattgcgaaattgttcccggagaaaaatcgatcccttgattgtctgccatacgatcatgccagagtaaagctggacaagcagaccgatgactacatcaatgccgcctacatgaagaacttgagtgccggctgtcccaactttattgtcgctcagactccccagccaaataccatcaacgatttctggtccatgatctggtcggagaagtcgcgcactgtggtttgcctgcacaccccaaatgaacttttcgatccctactggccgcaagctttggaccagccgactcattatgatgattacaccgtgacctgcttaaaagtgcagcaacttagccactgctccgagtatcaacttaaattgtccatgcatggagcggacgcagtgctggatttatctctactgcagctgaaacagtggaccaagggggctccagctcaacttctgggtgtggcggaaaatgctttggagacccatcgacaacgctgcaaggcagccaatgctccgcaatcgccgctcattatgaactgcttaactggttcagagcgttccgaactggtggccattggagtatgtgctattatagcgacccaaaacaagcagccaattttgttaaatacgattgatgtttggtctcgcatttgtgcgcagcgtcaaaattcgcttagggattccgccatcctggagcagtccatgcaaattgtgctctgcaatgctcacaatgtgctaaacaaacgtggcataatgacctcatatcaaatgaagatggcgccgcaggtgacagccaaggagcagcaggagaacaaggatccgctcaacgagttggatgcactttggaagctgaagtaa

SEQ ID NO: 14 - protein, 1833 aa, Drosophila melanogaster
  AAF49705
  GI:7294357
MEAVPRLHMLWFALKSSPEGTSFAALKKYIAEFYHEDPEAYSKEVHALETLRNQAMHTTKDGAPVMKRYYCQLHALQNRFPQLADRGIFTFKWKDLYHSAVHEVTDLRFERAAVLFNIAALHTQSGASVTRGDVDGMKMACTHFQAAAWAYGELRERYANVNGGGDFMTPELLVFQQQVCFAQAQECILEKSLIDNRKPHIVAKVTAQIVVYYGAALAALLTGGDDGPVAQVIDSSVYKLWKKYVRFKINYLTCILYLYQGQHSEEKRQMGERVTLYQASWDKLEEARKESKGLPDQREINESLSFTADVVEAKRKNAKNENEFIYHEAVPELSTIAAVQGANLVNGIGFQVSDEEHAGPDIFARLVPMKAHEASSLYSEEKAKLLRKYGALLEEKDTQLESYMSSLTLDNLNINEEQANKLPQGIVDRCAALNANKTAISDLVEAMSQLAEITADVETNLGEISSMLEAEAKAEREFQSATGVQRTPNAHITELSREFQKYSEAHARAGESNNTLRKAMSLHVNNLKILARPLPEIQQLMPKLSSELNTTEIFRDVKLILNKVNEMKAQRAQFHADLRIAINEDDITGKVIAHGGQEGLQALFATELGKHDKITELLDQNMVAQGNILQALTENYAKAAPVLKTLQDVKQKREHFYSSLAASYDVYEDLLAKSAKGLEFYKKLAGNVQKLLTRFRSARDVQSEERQQRMQSVKAATTPVVSKPIAETTPVPAVSSTPKLRDYLKAKAAMADASNPAYVPTVRPVPVGSENPTQAACSYATAPPNEPPPPYSLTQQQYFDPSAAGYTNPMYQQQQQHIAPPAYKAQASPNSQTLHGALGQMNLQGQSQDNNQAGMAYNYGYPSGSVPPLAYAPPGTVPASSASQGLNIQQPLYVATSGNPVSVSNPSELPSTLQAPFVVNPMSNPYQTAAGYSGQAYQQVNAQAQQVTYPTAPSGSSTGQSAQQPLGYAPSQGPQQQAGGYPQSQTPQQQVGAYQQQPLSGYAQQLTPQQQTGYSQSQAPQLQAPSYAQNQQSTGQAQQQQTGYPQTPQQHLAGYAQSQQQATGYPQSQTSQQQTTGYSQSQTPQQPLAYQQQPSGYPQQQQQQSLAPQQPSLYPSQAVQASPQPIPGQQATPPNAGQPLPYPQQYTDPNAAPAPAPGVSSVPSPVPVPTPAPTSSQAQVPTSPHPSATYTSYSNHPGYSFNPQTGKYEYSSGYQQDTSSLKGSQASQSYQFSQSGKQQSVGTTDSEIASRSNTATGFDSPIVSHTKVNMAAKDSTSAIEGNESSNYYSTPYGYLGSVNPQQQPTPAPPSNSTASIYMQSGASSTAETQTTSSGVPYASSAALTKVEPKPEALPPKVTSNVDLLSDLDIDCSVAVPPPMLPQPVLQPQVVATPTPPASQVSVPVKVESVAEHAAPATAEIPVAATEGTAQTPVTIPSGPKCASLDNLSNCSDLSSLENFDWDSVSVTHSVSEKQTKASATANGHSSSFAFQSETFTDEKTTKYFQKEVESYEKLLENLHVKMLNGKTQLGAKWQELQQKLDKEAAANKRSTTIAKLFPEKNRSLDCLPYDHARVKLDKQTDDYINAAYMKNLSAGCPNFIVAQTPQPNTINDFWSMIWSEKSRTVVCLHTPNELFDPYWPQALDQPTHYDDYTVTCLKVQQLSHCSEYQLKLSMHGADAVLDLSLLQLKQWTKGAPAQLLGVAENALETHRQRCKAANAPQSPLIMNCLTGSERSELVAIGVCAIIATQNKQPILLNTIDVWSRICAQRQNSLRDSAILEQSMQIVLCNAHNVLNKRGIMTSYQMKMAPQVTAKEQQENKDPLNELDALWKLK

SEQ ID NO: 15 - DNA, 2166 bp, Drosophila melanogaster
  Name: CG9092
  AE003612
  GI: 7297037
  Transcript: CT26090
attctggtccacccatccgagtggagcgagctttcaagcaagcttatatcgctagcgatacatttgtggtgtttctccaagctcccaagtcggctcttcaatatgagcggttgtcgtcgcaatcgaaagctgacgatggccgtaagtggatgtctgataattgctgtgatggccctcaccgttgggctttgtgtgggactgagcggtgacaccgacgcccccgaggaacagccaaggtttacgatcgaccatgaggccaacaccttcatgctggatggccagcccttccggtacgtctctggatcgtttcactatttccgcgctgtacccgagtcctggcgaagtcggttgcgcaccatgcgagcatctggtcttaatgctctggatacctatgttgaatggtcgctccacaatccgcacgatggagaatacaactgggagggcattgcggatgttgtcaagtttctggagattgctcaggaggaagacttctacatcattctccgcccaggtccctacatttgtgctgagcgagataatgcaatattattattcataattttgactaatattgcctcttttcagggtggtcttcctcactggttgtttaccaaatacccgtccatcaagatgcggaccaatgaccccaactacatctcagaggtgggcaagtggtatgcggagctgatgccacgcctccagcacctgttcgtaggcaacggcggcaagatcataatggtgcaggtggagaacgagtacggtgactatgcctgcgatcacgactacctcaactggctgcgagacgagacggagaagtatgtgtccggcaaggcgctgctcttcacggtggacatacccaacgagaagatgagctgtggaaagatcgagaacgtgttcgccaccactgacttcggcatcgatcgcatcaatgagattgacaaaatctgggcaatgctgcgtgccctgcagccgactggcccactggtcaactcggagttctatcccggctggctaacgcattggcaggagcagaaccaaaggcgtgatggccaggaggtagccaatgcactaaggacaattctgagctacaacgctagtgttaacctctatatgttctttggcggcacaaactttgggttcactgctggtgccaactataatctggacggtggcatcggatatgcggcagacataaccagctacgactacgatgcagtgatggacgaggccggtggcgtcaccactaagtacaaccttgtcaaggctgtgattggagaattccttccgctgccggaaatcaccttgaatcccgctaagcgtctggcctacggaagggtggagctgacacccaagctgacactgctctcgacggaaggacgtgctgcgctctccaagggtgatcccgtcgaatcgatcaagccgaaaaccttcgaggaactagacttgtactcgggcctcgtcctgtacgagaccgagctgcccagcatggatctagacccagccttgctgaaaatagatcaaattaacgatcgagcacacgtattcgtagaccaggaactggtgggcacactctcccgcgaggcacagatctactcgctgccgcttagcaagggttggggcagcacactgcagctgctggtggagaaccaaggacgcgtcaacttctacatctccaacgacacgaagggcatctttggtgaggtgagcctgcagctgcacaatggtggttacctcccgctggagaactggcggagcaccgctttcccgctggagcaatccgccgtcgagctctggcggcgcgaacacactgacgagaaggccttggacccgttgctggcaaggcaacgcattcttcgaaacggaccaatactctacactggcagcctgacagtgacggaggtgggcgacacctatttgaacatggccggttggggcaagggcgtggcctatgtgaacggttttaatttgggacgctactggcctgtggcaggtccacaggtcaccttatatgtgcccaacgagatactgaaagtgggtgaaaactctctggtgatccttgagtaccaacgagcgaataagacagcaactggcgaggatctacctgcagtgcagttcgacgcagttgctcagctggacggagagtctggtgatgttccacttaaatga

SEQ ID NO: 16 - protein, 672 aa, Drosophila melanogaster
  AAF52321
  GI:7297052
MSGCRRNRKLTMAVSGCLIIAVMALTVGLCVGLSGDTDAPEEQPRFTIDHEANTFMLDGQPFRYVSGSFHYFRAVPESWRSRLRTMRASGLNALDTYVEWSLHNPHDGEYNWEGIADVVKFLEIAQEEDFYIILRPGPYICAERDNGGLPHWLFTKYPSIKMRTNDPNYISEVGKWYAELMPRLQHLFVGNGGKIIMVQVENEYGDYACDHDYLNWLRDETEKYVSGKALLFTVDIPNEKMSCGKIENVFATTDFGIDRINEIDKIWAMLRALQPTGPLVNSEFYPGWLTHWQEQNQRRDGQEVANALRTILSYNASVNLYMFFGGTNFGFTAGANYNLDGGIGYAADITSYDYDAVMDEAGGVTTKYNLVKAVIGEFLPLPEITLNPAKRLAYGRVELTPKLTLLSTEGRAALSKGDPVESIKPKTFEELDLYSGLVLYETELPSMDLDPALLKIDQINDRAHVFVDQELVGTLSREAQIYSLPLSKGWGSTLQLLVENQGRVNFYISNDTKGIFGEVSLQLHNGGYLPLENWRSTAFPLEQSAVELWRREHTDEKALDPLLARQRILRNGPILYTGSLTVTEVGDTYLNMAGWGKGVAYVNGFNLGRYWPVAGPQVTLYVPNEILKVGENSLVILEYQRANKTATGEDLPAVQFDAVAQLDGESGDVPLK

SEQ ID NO: 17 - DNA, 1404 bp, Drosophila melanogaster
  Name: Arr1
  AE003657
  GI: 10728850
  Transcript: CT17964
ggcgtataccatcgagaacgagcgcgaaacgttaaaggcacatccaaagtttaaactatttccgcagagattttgataaacagctccaaaatggtggtcaatttcaaggtgttcaagaagtgttccccgaacaacatgatcacgctctacatgaacaggcgtgattttgtagattccgtgactcaggtggaacccattgatggaatcattgtgctggacgatgagtacgtgcgccagaaccgcaagatcttcgtgcagttggtctgcaatttccgatatgggcgcgaggacgacgagatgatcggtctgcggttccagaaggaactgaccctggtctcgcagcaggtgtgcccaccccagaagcaggacatccagttgaccaagatgcaggagcgtctgctgaagaagcttggctccaatgcctatcccttcgtgatgcagatgccaccaagctcgccggcctcggtggttctccagcagaaggccagtgacgagagccagccctgcggagtccagtacttcgtaaagatctttaccggagacagcgactgcgatcgatcgcatcgcaggagcaccattaacctgggcatccgcaaggtgcagtacgcaccgaccaagcagggcatccagccctgcaccgtcgttcgcaaggacttccttctgtcgcccggagagctcgaactggaggtcaccctcgacaagcagctgtaccatcacggcgagaagatctcggtgaacatctgcgtgcgcaacaactccaacaaggtggtgaagaagatcaaggccatggtgcagcagggcgtcgatgtggtcctgttccagaacggtcagttccgcaacacgatcgccttcatggagacgagcgagggatgtcccctgaacccgggatccagcctgcagaaggtcatgtatctggtgcccaccctggtggccaattgcgaccgcgcaggcatcgccgttgagggtgatatcaagcgcaaagacacagctctggcctcgaccacacttattgccagtcaggatgcgagggatgcctttggcataattgtttcatatgctgtgaaggtcaagcttttcttgggagccctgggcggcgagctctgcgctgagctaccatttattctgatgcacccgaagccaagtcgcaaggcccaactggaagccgagggctccattgaggcctaaactgaaagggctacctcaaccaacgaaaaaaatggcgtatttctacaagtcaaaccgatttttgtagatcctaaaaaatgctgatgttgctgaaatgttctgaactgcagtcgtcgtacttttcctatatagcaaatccaatatccatatattgtatgtgtgtatgtgtattatatttataactcaactaacaattaaatatgaacagagtttatgtat

SEQ ID NO: 18 - protein, 364 aa, Drosophila melanogaster
  AAF53644
  GI:7298421
MVVNFKVFKKCSPNNMITLYMNRRDFVDSVTQVEPIDGIIVLDDEYVRQNRKIFVQLVCNFRYGREDDEMIGLRFQKELTLVSQQVCPPQKQDIQLTKMQERLLKKLGSNAYPFVMQMPPSSPASVVLQQKASDESQPCGVQYFVKIFTGDSDCDRSHRRSTINLGIRKVQYAPTKQGIQPCTVVRKDFLLSPGELELEVTLDKQLYHHGEKISVNICVRNNSNKVVKKIKAMVQQGVDVVLFQNGQFRNTIAFMETSEGCPLNPGSSLQKVMYLVPTLVANCDRAGIAVEGDIKRKDTALASTTLIASQDARDAFGIIVSYAVKVKLFLGALGGELCAELPFILMHPKPSRKAQLEAEGSIEA

SEQ ID NO: 19 - DNA, 741 bp, Drosophila melanogaster
  Name:CG9150
  AE003612
  GI: 7297037
  Transcript: CT26200
atggagcggtggcagaacaaactggctgtggtaacaggagccagcggaggcataggcgccgcttgtgctcgggccatgatcggcgctggactacgggtggtgggcctggcacgtcgggaggccaagttgaaagagctcagggagagtctgccccgggagctgcaggcgaacttcataccgcggcgctgcgacgtctccaaggaagatcaggtgcagagctcttttgactggatcgaacgggagctggagggcgccgacgtgctgctgaacaatgctggcattactcgcgagacggaactggtcaccccgagcaatacgcagaagcttaaggaggtcatagacaccaacgtaatgggcgtgatttggtgtacccgcgaggcgttcaataacatgaaacggcgaggtggcgaaggtcacgttctcatcatcaacagcatagccggacatcaggtgctcaacttcatcgacgttttgccatcgttcaatatatatccggccaccaagtttgccatcaccgccatcacagagacatatcggcaggaatttcagctgcactcgaacaaaatccgggttactggcatctgtcctggtgcggtgaacacgaacatcttcccggaagagatccatttttacgtcaaagacatggccagactcgaaccagcgaacattgcggacgcagtgatgtatgctctgcgaactccgcctcatgttcaggtgagcataatcactattatgtattaa

SEQ ID NO: 20 - protein, 246 aa, Drosophila melanogaster
  AAF52338
  GI:7297069
MERWQNKLAVVTGASGGIGAACARAMIGAGLRVVGLARREAKLKELRESLPRELQANFIPRRCDVSKEDQVQSSFDWIERELEGADVLLNNAGITRETELVTPSNTQKLKEVIDTNVMGVIWCTREAFNNMKRRGGEGHVLIINSIAGHQVLNFIDVLPSFNIYPATKFAITAITETYRQEFQLHSNKIRVTGICPGAVNTNIFPEEIHFYVKDMARLEPANIADAVMYALRTPPHVQVSIITIMY

SEQ ID NO: 21 - DNA, 1671 bp, Drosophila melanogaster
  Name: CG11102
  AE003493
  GI: 10728232
  Transcript: CT31063
atgcgtggcagtattctggatgccgaggcgcgcacctcaatcaacatttggatatatctcaagagcttggttatcctgttcgatattgcctggctggcggtgggatccgtttggctggggcattactacaccactgcaccgatcgatgatcccaaaaaggtctacatagcaattatcatctgcaattgggctctggtggtgatcaccctaatcacgatatggtgcaccttcgatgctgccggaagatcctgggtaaagatgaagaagtaccagcgatcaatgcgcgaaacagagtctcggtttaactacaagcggagcaacagtatgaaccgcaactggcgacaaaggaaagtgatgcgagcctaccaggatagttgggatcatcgctgccgcctgctattctgctgcatgggctcctcggagcgcaaccgaaactcattcacggacatcgcccgtctgctgagcgacttctttcgggagttggacgtggtgccgtcggatgtggtggccggattagttctgcttcgcaagtttcagcgtctcgaacgcgaggccattgtgaggcagcgcaaaaatggcacctatgagttcctcagcggcgtaccgattacggagcgaacccagttcctagcactcaacgatgccaaaaactatgacttctttcaaacggtcatccactatatgtactttgcccagggagcctacggttggcccatgtacgtcatcatcaatcgcagcaagatgtggcatttggtgccggaactgaaatgctttggctgctgttgcggtacaagtgatgatacagaggttatccaggacaattgctgcctgtgcaactatgcagcgctgaagaagacgctccagctgggcgacatcgatatcgtttacgccacctatcacgtggatgtgggcgagacgcccttctttgtggccatcgactatacacatcgggcggttgtgatcagcatacgtggtacccttagcatgaaggacatacttacggatctgaacgccgagggcgaagttctgccgctgcagccgccgcgtgacgattggctgggccacaagggaatggtgcaagcggcgatctacatacgcaacaagctgcaggaggagaatctcatcgagagggcactgcaacggaatccggaccgtcagacgcacacctttgatctggtgctggtgggccattcgctgggcgccggaacagcggccatactcgccattctccttaagcccgagcatccaacgctccagtgcttcagttactctccgccaggaggtctgctcagtatgccagccgtggagtactcaaagtcgttcatcacctcggtggtgctgggcaaggatgtagtgccgcgcatcggtctcaatcaaatggaggccctgcgagcggaccttatcaatgccattcagcgcagcgtggatcccaagtggaagaccatttcctgctcggtcatctgctgtggctgtggacccgaacccacttccgtggtcaacatgtccggccaggacacgcacatcaatcagtaccaggaggagcgtggcactgcccgttcgaccagcgctcatccgacggacagctcgatagctttaactctgcaccagcccttatatccgcccggtcgcatcattcacatagtgcgacatcatcccaagcccgacgagtga

SEQ ID NO: 22 - protein, 210 aa, Drosophila melanogaster
  AAF48320
  GI:7292929
MKEIKKKSKPKRKPTRMEVEESEPEMPFSYKTQPDEGESVNGEAHTSDDGDEMELATFKAASKKGVIYISNLPKHMTLTRLREILGEYGAIGRAFLRSQKLSRKPHNFLFAEGWVEFKSKRVAKQIVPLLNYKQISTHKKSPFYYSLWIMEYLPRFKWARLNELMNIVPVTNSQNHLKFLNKKAKKAKKVKKAKKALADRLLELVLASSI

SEQ ID NO: 23 - DNA, 10910 bp, Drosophila melanogaster
  Name: Smr
  AE003490
  GI: 7292788
  Transcript: CT4722
ttacagagcgcagtgtgtgttgcaaagaaaaagtgcaatcaaaataaaaataaaataaaaatgcaaacgcattaaggcaaatgctgttgccacgttgcagcaacaacagcaaaccaaaaataaagaaagaaataaagaagcaacttacacaattaagttagttaaactttaagagaaaaagttacaaaattatcgaaaattagtgctaactttaaagcgaaatttttttgtggggcacttccgagagaatgtcgcagtgcaataatgttgcaactgtcggcagcagcaacacaagcaacagcagcaacacgttaacaacagcaacaacaacaaaacaaagcaaatcaatcaattctgcggccaacaacaagtgtttaagccaaaagagttcggcatgaaatggaagcagctatacgctccacttcagtgcaggtcggtgctccgccgcccacaaacaacaacaacagcagcagcagcagcagcagcaacagcaacaacaacaacactagcaacaataacaacaatagcagcaacagcggcaacaacaacacaccaaacggtgcgcaacagcagcaacaacaacaccatcagcagcagcagcaacatcatcagcagcaacgtgttgttgccagcagcaaccagcaacagcaacaacaacaactacagcaacagcagcagcagcagcagcaacaacagcagcagcagcagcagcagcagcatgataatggaccaacgtcccatcatttgcatcaatcatctatcagcatctctaatcagcagaataaagcgacgcaacagcagcagcagcagcagcagcagcaacaccaaaagcagcaacaacaacaggcttccagcatgtccgcgtatcagcaacgcctgccatcaaatgcagcatccattcacaggcgcccccactggtcttacagggccctcgagcagcagcagcagtatgcgaagcaggcggctcatctgcagcagcagcagcagcaccagtcgcaccaacagcagcagcagcagcagcaacaggaccaacgcaccaacctgcatctgcaaatccatcaccaccaccaacagcagcagcagcagcagcagcagcagcaacaacaacagcaacagcagcaacagcagcagcagcaaaaacagcagcaacatcatatgcagcagcagcagcagcaacaacctttgtcaccacctcacccacccggcagcagcagcaacagtagtagtgcagcagcggcagcagcagcagcggcagcggctgcggcggccgtcaatcctggttacccgccatcatccgcagcagcggcggcagttaactccggttacccgccacggcccccgcagcatcgttttatccagaacacgggctatagcattgccccggcgcctacctaccgagataatccctactcgcgccacacccaaattcagcagcagcagcagcagcagcagcaacaacagcagcagcagcaacagcagcagcaacaacagcagcaggctgcagcgtcgatgcccgaatatcagagggcagcagctcgagcggctgtggcggcggtatcggcgggtaaaggcaacgtttctggccaaagttcgaacagcagcagcagtagcagcggaggtggaggtggaggaggaagtgccggcggatcagctccacccggcggcggtgttgtccaggtatcgcaatccggcggagtgctggtcatggaggccatgccccactatgccagtcaaccaaatagtaatccctcccagcagcagcaacagcagcatcagcagcagcaaggcggcaatcccagtggcgcgggtgcaacatctggtgctggcggcggtggaggcggcagcggtggcagcgtaatggtcgggagtctggggcgcatcctgatgccccatccacaggctctgcaatacaccagcgagtacctgaccaatgccacagcggccgttgctgcggcgatggtcaaccagcgacagcatttgcagctgcaacagcagcagcagcagcaacatccgcctgagccatttggcggccagcagccgtacaagaagcaacggcttagcgaggccaatgccaataatatgaatcacctgccaccacacccgcagcagcaacaccagcagcagcagcagcagcagcagcaacatcaggcgcaccagcagcaacatcagcgatcctcaccagcgcaagtgcaacagcaacagcagcaacagatgaatagcagtcggcagagtcacaatgatatgtgccgacaagtggtcaccacgccaatgggcatgcagctcaaggtggagacgctgccacagcagcaacagaagcagcagcagcaccaacagcagcagcagcagcagcagcagcagggccgatctcagccagtggtgagcagcatgtccaccgtggtgagccaaccagtgggcacggttaccgttaccacggcgggattatcggcgagccacagcggcagcagtggcaatgttgccgccggattgggtacgggaaatacgggatccgccagcaccgaggcctatcatcctcaggtggaggccatttcgccgacattgcccagcgatagttcgattgaggagcgcggaaggaccagcgccaaagaggatcttctcatgcaaatccaaaaggttgacaatgagatcaaatccgctgagacgacaatggaaacgttgcgcaaaaaggagaaatccctcatggaggaggccgccctggccaaagagcagagggccgccaaagagttgaacgataacaacaatgatcaggaaccgatggtggaactatcgtggcgcagccaaatgctagcggagaagatctatgcggccaatcggaagacggcccaagcgcaacattccatgctgcagaatgcagcggccgatgaatcgtctccgggttccgttgccggcagaccatggttgccattgtataaccagccactcgatgtcgaggcacttgccatgctaatacgccagcatcagagtcaaattcgtgcgccgctacttttgcacatacgaaaattgaaggccgaacgctgggcgcacaatcagggactggtggagaagtacaccaaggatcaggcggattggcagcgacgatgcgagcgtatggaggccagtgccaagaggaaagcacgcgaggcaaaaaatcgcgaattcttcgaaaaggtcttcacggagctaaggaaacagcgcgaggataaggaacgtttcaatcgcgtcggttcgcggattaaatccgaagcggatctcgaggagatcatggatggcctgcaggagcaggcgttggaggataaaaagatgcgatcctatgcggttataccgcctctgatgcacgatgcccgccagaggcgatgcgcctatcataatgaaaatggacttatcgaggatatggtggcagttcatcaacagcgtaaggccctcaacatgtggaccgccggcgagaaggagacctttaaggagaagtatttgcagcatccgaaaaactttggagccattgcggctagtttggatcgcaaatcgccacaggattgcgttcgctactactacctcagcaagaagaccgagaattacaagcagctgcttcgaaaatcccgccaacggacgcgcagttcgcgtaatccagccaaggctcaggccgcacagccgcagtgcattatcgattcgatgaccactggcgttatgacgcgattgcagcgcgaacagcaacaaaagtccggcggtcgttcatccgccgttgctgagcgtgagcgtgcggaacgtgccgccgagcgtgagcgtgtggcagagaaagcggcagctgatgctgccaaagcggctgaaagtgccgccgaaaaggcaagcgccgccactaaggctgtcgaagcaacggctgccggtgaaaaggtggccaaagcggctgcagcagcggcggcggcagcagcaactaccgccacaaccgcaacaacaaccacatcatcatcaacatcatcatcatcatcatcagcatcatcagcatcaacagcatcatcatcgacggcaagtccagcgacattggcaggaatagccgcagataaaacggatgccggcaaaacggctagcgccagcgataagaatgcagcaacagctggtggaccaacggcaacgggaactccgacagcagcaactacacctgcaacagcaacagcaccaccagagatctcagcgggcggcgaggccaagagcaaaaatgccgaggaggaggcagctgccacagccggagcagcaacggtggccactgccggtacaccggcaaccggagcaagtgcggccagtgctggcgaggcgacaacggcaacgggcgccacggcgacagctgccgccaagggtgttggcaaaccggaaacagcgactgagccagcgggaacggctgctaagggagctgactctcggccagatgccaacgatccgctggccaaaactgcttcgaaggctatcaatgccgagggctataatgctatcggtggcaacagcagcagcagcagcagcaatgcaacgggcgcctctgctccagtgcagggcgttaccttgaatggctttaagcctggctatcaaaccgtggtcatggccaatgtaaaggcatccacgggtggcgatgattctggtgcgaacgctggtggagcagcacccggatcgttagcagcaacgaatgcatcgattgcgacgagtggcgataaaatcgtcaagacaacgccatcatccagggcgccaaattctacatcttcaacggcggcgaatgagagtagtagtggtgccggagtgaatacctatggccacaccgcaacaacggcgggcaattatcttggacagaagctgaaggctgcccaagttgagggtttgggagctggcaatgaattgcattcggatgttagtgaatccaagaggaaacgattcgaactgaattccggtgaggcaggtggaaatgcaacgtcagctatgaccaatagcagcaccagtggcagcatgaacatcagcaatagtcacggattgaaggccaatgccaaggatggatcgatgatggccaaaacatcgatggcatccacatcgtcggcatcggttgttgtcacatctacgccatcggcatcctcatcgtcattgtcatccgcgtcgtccatgctgttgataagtgccgcatccgtaatgtccacggcagcgggtgcaacgtcctcgtccacggcgacaacaacggccacagcttcggcgatctcgttgccgctattggcggatggcagtggcaactcgatggtcaatgcaaacgagattctcgccctcgatggcaaagacaaattggccagctgctttgtgtgcaaggcggaggcgtgtccccgcacccgtccactaaagaaggggcgtggccagcagtatggcattccggacgaaacaataccggcgggtgcccgcgtctgcaatagctgtcaatgcaaatcggtgcgcagccgctatccaaattgtccgctacccacatgcccaaatcccaaggatcgagcccagcgtctgcggaacattccctcccgtctcttcgaactggcgcccgaggtgcgtgatccgttgatggccgaatttcaaataccaccgcatgcaacacgctgctgttcggcctgcctaatgcgcattcgtcgcaagctcgatccgcagctgaatctcaccgatggctccagtggcggtgccggcagcggcagtggcggcgatgagacggatgtcagtacctcgtcgtgtgatgaacgagagccgggcggatccgataccgcttccgttgagagtccggagaatttgcagcggcacaagtcccttacgatggtcaaacagcaacagcaacagcagcaacagcagcagcagcaacaacagcagcagcagcagcaacagcaacagcaactatcgcagccacagccacctccgccagctccgcagcagcagaagggttcgtctggacgaggtggtgatcagggtacaccactgattatcacaccaacccgaatgagcagcaagtcgggatcgggcggtgcgcaaacagcgggcgacaatgaacgcctactgccacccgccgctggccaggcacccaagaagcaaaagaccagcgaggaatacgattcctcggccacggaaacggcggatgaggagaacgaaaactcgccggccaatcgtcagagtcccaaggtactattccatggccatggacatggacatggtggtcatgccaataatgtggctggtctgcagccgccggtggccaatatggggacgggtggtggtgttcaaccaggtggagctgctgggcaacaggtcaacggaccgattagtatgcgacgcgaggcggtcaacaatgttcaggattgcgtattctcggtaattgagcgttcgctgaagcacaagggtccgcaaccgaagggcggacagggtcagcagcagggtcaggggcaaggacagggccagggtcagggtcagactccaggtcaaagccagtccccatcccagcagcaacagcagcagcagcagcagcaatctgccaataatctggaacgcaaggagcttaccattgtaagggaataccgccaggatccgggtatactgaagcagcagcagcagcagcagcaggctggcggagcaccgcccacctcggctgccggtagtttgccgcatggcacctccgtacagaagctaacaacccggccagctgcagtggcaccaccgccaccggctcatccactgacacccaccagcactggatgtgcgggcagcaacaacggaaccagcgatagcctagccaccttatcggtggtcaattcgcacatgggcatggtgggaattggtcatccgggcccgatggcccacgcaagttccgccggaggaatcggtgtggacaaggcgaccataacgccggttgtcaagagctctagtggatcatcgaagagcggcggcggcagtgcgtccagtcactcgacagccacaccgccggagaccataatctacaatgtgccagtggcgcatccgcaacgtggtataccaccaccgtcgcagcactcggtacatccggcccatccgtcgcatacacagcatccggcccatccgcagcattcgtcgcatggtcagcatacgcagctgcaagtgccggaaccggagccgcaaacattggacttgagcatcaagaagccgccgcgcgatggccattcgccgcacacgggagccggaggatctagctcgtctggctctggatcgggtggaccgtcctcatcggatcgacatcatggcccaccaccgccgaccatgtcgatgaagcacattgtacgctctggtggcatgtatcgcggtgacaccgtaactgttccatcgctggctgcacccagttcgtatctgtatcccacacggagtgtcaagaccattggcggcggtggcgtggtgcccggtgtgctgcccggtgtgcctggtagtgcactatatctacaaccagtaccagtgcccgtacccatttccatttccggtcaaggccagttgccgccgagagctggacaaccgccaccggcacagccgccatccggcaggggtgtggccaaggtgccacccaagctaagtccccagcaggcccatcacttgcatcccagtcacggacactcgccatcgcagcagcagcaacagcagcagcaacagcagcaacagcagcagcaacaggcggctgcagcacaacaacaattgctggtgaaaagcggctcaatcacccatggaacaccggccaatagtgcccagcaacagattatcgttcatgcaccagcgacggcagcagcagcaccctcctccctgctcagtcccaagttcgatggcttggtcaggcaaacgacaccagagggtgtgggttccgttggacccggaggagcaagtggcagcggcaagcatggctcgataacgcagggtacaccgttgcacatgccaccgcatcatttggagagcaaacggccatacgagagctactacaagagctcgcagcgtcacagtcccgcccaacagccgggtggcaatcagcaattgccgccgccgccgcagcaatcgtctccacaggcgccacctccgcagggctatggtgtcggtgtgagctcaccctatgcccgatcgccgttcgccggtgtcgtggaacagccgcaggtgctgagcacgcgacaaattgtgatgcacgactacataacctcacagcagatgcagggacagcaacagcagcaacagcagcagcagcagcaacagcgcaacatgtcgcgcggcagcagtgccagtggcggtggaggcggcggtggttccgacaaggagtcaccatcgccacgaaacagtgtgggcagcgccagtggtttcgcctatggcggcgacaaggaatcggcaccccgtggccgaccggagtactccagtcgtgcatcgccagccgatcatgttaatagtggtcacgatgcattggcctcgtttgtggacgtggccgtgcagcagccgcagttaccggtgccgtcgcaaaaggatgacaagtcgccgggtccatcaacggcgccgggacaagtgcccggatctggtccaccacttggaccatcacctctgccgccacacgctgtggtcggcgtggcgcagccaccgccgccgaccgcacaccacgatcaacggtatcgcgatctgaccctgcatcaccatcatcatacactggtgcagcagcagattgcgcaacaacagcattatcgtagcctcaatgtggcggcccaggtcgatatgcagcggcagatggatcaggcgaaacgtgtgatgcgccaccaacagcaccaggtccagcagcagcagcagcagcaacagcagcagcagcacaaccatgccctggaacgggacagggagatgcaggaacggatgcgcgaacgggatcgtgagcgggaaagggaaagggagcgtgagcagcgggaacgagaacgtgaacgagaacgcgaacgtgaacgggagcgcgagcgacgtgaacaggatcgtgcgcggcgtgtggtggccgaagagcgggagcacgatagtcgacgcatggagcgcatgttcgccggcaatgtggtcactggatcaggtggcgccggcggcggaggaccgtcgcccggtcaatttctgcgggcttcggttccggaaactggtccaccacgctcaatcccagatcgcgaacgggaatcgtactatcgtcaggcacacggcggtccagctccagaggatacgcccgggcaactgagcgcccagagtctgatcgatgccatcatcaagcatgagatcaatcgttccaatgatgccaccgctggcccgggtcgcgaatttccgcgcccatcgttcgttcatgctccgttgccgccacgtggttccggatcgggaggcggcaccggtacacgatcctcaccggccaatgtgctccatccgatgtacctgcgcgatctacgccagccgctcgacggcggagcgggatcaatgcttacggcggagaacaatggcaagcccagctcgtcgggatcgcccagtgtgattaatattgatttggatcaggagcgcatctcagcggcagcggcagcagttgcccagcagcagcagcagcagcaagctccgcctccgtcgcaatcgtcgcagtctagatccgtgcacggtcagctaaggacaccgacctcgcaagctggcggatcagcgcccagtccacagcagattcatacgaagagcattacctttggggaactaaccgattcgataattaccagtgactacggcaccaatcctcatctgcggccaccatatatggcctatttgcaggagacgcagtcaattctgccgccggatcgctggaagcagaaccgtcgtatgcaacagaaggccgaggaagcgaagcaccattcccagcagcagcagcagcagcaacaccagcagcaacatcacgcccagcagcagcagcagcagcagcagcaacaccatgcccagcaacatcatccgcagatgccgggcactggctctggctcggctccaggtggtgctggtcagggcggtggatcgggcggcccgggtagcggtggtggtggcgccggcagagccagcacacctggcgaggatgggcgcaacataatccgaatgccacaggcggtcagtccgcgaaaatttaatcatgagatgatgctacatcatgtgatgggaacgacgggagcgggtggtgaagctggtcagttcttcctacccagccgtgtcgttctgcccgagcagagaggaacgcccagcggtggtggtggagcgcctggagccggaggtcctggatccggaggcggtgctaccaccattgaaaaatatgtaaagacccgcattgctgaagtgatgcgcgatgatattggttatggaaagaatcggactgtcgaggtgcgaacagaggatgaagtaaccgccgatatggtggcacattcgcatgccgccgtccatgctgcacatgtggcgcacgcagcccatgtcgcccatgccgctgctatggagttgcagcacagaagcaaggaaccaccgccgccagagatcagtgtgtcacgtaagacgcccaaccaatacgaggtggtagacgccagtggcgaccaggcggtggcaccacctggtgcctttgccaaggccaaggcagcgcatgccctgagtgaactgggtgcagtcggtggtggggtgtcattggtggtgggcggcggctctggaggaattgcaggcggaccaggtggtgtctcagtcggtgtcggtgtaccgggcggcggcggaccaggaagcggtggcggcggcggtggcggtcacaattccagttcatcgcaagcatctgctgcggttgccgctgccgttgcagcggcggccagtgagtccaagccgctgctgttgtccaagtacgatgcactcagcgacgaagattagtt

SEQ ID NO: 24 - protein, 3604 aa, Drosophila melanogaster
  AAF48196
  GI:7292802
MKWKQLYAPLQCRSVLRRPQTTTTAAAAAAATATTTTLATITTIAATAATTTHQTVRNSSNNNTISSSSNIISSNVLLPAATSNSNNNNYSNSSSSSSNNSSSSSSSSMIMDQRPIICINHLSASLISRIKRRNSSSSSSSSNTKSSNNNRLPACPRISNACHQMQHPFTGEALEQQQQYAKQAAHLQQQQQHQSHQQQQQQQQQDQRTNLHLQIHHHHQQQQQQQQQQQQQQQQQQQQQQQKQQQHHMQQQQQQQPLSPPHPPGSSSNSSSAAAAAAAAAAAAAAVNPGYPPSSAAAAAVNSGYPPRPPQHRFIQNTGYSIAPAPTYRDNPYSRHTQIQQQQQQQQQQQQQQQQQQQQQQQAAASMPEYQRAAARAAVAAVSAGKGNVSGQSSNSSSSSSGGGGGGGSAGGSAPPGGGVVQVSQSGGVLVMEAMPHYASQPNSNPSQQQQQQHQQQQGGNPSGAGATSGAGGGGGGSGGSVMVGSLGRILMPHPQALQYTSEYLTNATAAVAAAMVNQRQHLQLQQQQQQQHPPEPFGGQQPYKKQRLSEANANNMNHLPPHPQQQHQQQQQQQQQHQAHQQQHQRSSPAQVQQQQQQQMNSSRQSHNDMCRQVVTTPMGMQLKVETLPQQQQKQQQHQQQQQQQQQQGRSQPVVSSMSTVVSQPVGTVTVTTAGLSASHSGSSGNVAAGLGTGNTGSASTEAYHPQVEAISPTLPSDSSIEERGRTSAKEDLLMQIQKVDNEIKSAETTMETLRKKEKSLMEEAALAKEQRAAKELNDNNNDQEPMVELSWRSQMLAEKIYAANRKTAQAQHSMLQNAAADESSPGSVAGRPWLPLYNQPLDVEALAMLIRQHQSQIRAPLLLHIRKLKAERWAHNQGLVEKYTKDQADWQRRCERMEASAKRKAREAKNREFFEKVFTELRKQREDKERFNRVGSRIKSEADLEEIMDGLQEQALEDKKMRSYAVIPPLMHDARQRRCAYHNENGLIEDMVAVHQQRKALNMWTAGEKETFKEKYLQHPKNFGAIAASLDRKSPQDCVRYYYLSKKTENYKQLLRKSRQRTRSSRNPAKAQAAQPQCIIDSMTTGVMTRLQREQQQKSGGRSSAVAERERAERAAERERVAEKAAADAAKAAESAAEKASAATKAVEATAAGEKVAKAAAAAAAAAATTATTATTTTSSSTSSSSSSASSASTASSSTASPATLAGIAADKTDAGKTASASDKNAATAGGPTATGTPTAATTPATATAPPEISAGGEAKSKNAEEEAAATAGAATVATAGTPATGASAASAGEATTATGATATAAAKGVGKPETATEPAGTAAKGADSRPDANDPLAKTASKAINAEGYNAIGGNSSSSSSNATGASAPVQGVTLNGFKPGYQTVVMANVKASTGGDDSGANAGGAAPGSLAATNASIATSGDKIVKTTPSSRAPNSTSSTAANESSSGAGVNTYGHTATTAGNYLGQKLKAAQVEGLGAGNELHSDVSESKRKRFELNSGEAGGNATSAMTNSSTSGSMNISNSHGLKANAKDGSMMAKTSMASTSSASVVVTSTPSASSSSLSSASSMLLISAASVMSTAAGATSSSTATTTATASAISLPLLADGSGNSMVNANEILALDGKDKLASCFVCKAEACPRTRPLKKGRGQQYGIPDETIPAGARVCNSCQCKSVRSRYPNCPLPTCPNPKDRAQRLRNIPSRLFELAPEVRDPLMAEFQIPPHATRCCSACLMRIRRKLDPQLNLTDGSSGGAGSGSGGDETDVSTSSCDEREPGGSDTASVESPENLQRHKSLTMVKQQQQQQQQQQQQQQQQQQQQQQQLSQPQPPPPAPQQQKGSSGRGGDQGTPLIITPTRMSSKSGSGGAQTAGDNERLLPPAAGQAPKKQKTSEEYDSSATETADEENENSPANRQSPKVLFHGHGHGHGGHANNVAGLQPPVANMGTGGGVQPGGAAGQQVNGPISMRREAVNNVQDCVFSVIERSLKHKGPQPKGGQGQQQGQGQGQGQGQGQTPGQSQSPSQQQQQQQQQQSANNLERKELTIVREYRQDPGILKQQQQQQQAGGAPPTSAAGSLPHGTSVQKLTTRPAAVAPPPPAHPLTPTSTGCAGSNNGTSDSLATLSVVNSHMGMVGIGHPGPMAHASSAGGIGVDKATITPVVKSSSGSSKSGGGSASSHSTATPPETIIYNVPVAHPQRGIPPPSQHSVHPAHPSHTQHPAHPQHSSHGQHTQLQVPEPEPQTLDLSIKKPPRDGHSPHTGAGGSSSSGSGSGGPSSSDRHHGPPPPTMSMKHIVRSGGMYRGDTVTVPSLAAPSSYLYPTRSVKTIGGGGVVPGVLPGVPGSALYLQPVPVPVPISISGQGQLPPRAGQPPPAQPPSGRGVAKVPPKLSPQQAHHLHPSHGHSPSQQQQQQQQQQQQQQQQAAAAQQQLLVKSGSITHGTPANSAQQQIIVHAPATAAAAPSSLLSPKFDGLVRQTTPEGVGSVGPGGASGSGKHGSITQGTPLHMPPHHLESKRPYESYYKSSQRHSPAQQPGGNQQLPPPPQQSSPQAPPPQGYGVGVSSPYARSPFAGVVEQPQVLSTRQIVMHDYITSQQMQGQQQQQQQQQQQQRNMSRGSSASGGGGGGGSDKESPSPRNSVGSASGFAYGGDKESAPRGRPEYSSRASPADHVNSTPSPHRTPPPQRQGVIQRHNTGSKPPSPAAPPPSRMHMPPYQYAPSGHDALASFVDVAVQQPQLPVPSQKDDKSPGPSTAPGQVPGSGPPLGPSPLPPHAVVGVAQPPPPTAHHDQRYRDLTLHHHHHTLVQQQIAQQQHYRSLNVAAQVDMQRQMDQAKRVMRHQQHQVQQQQQQQQQQQHNHALERDREMQERMRERDREREREREREQRERERERERERERERERREQDRARRVVAEEREHDSRRMERMFAGNVVTGSGGAGGGGPSPGQFLRASVPETGPPRSIPDRERESYYRQAHGGPAPEDTPGQLSAQSLIDAIIKHEINRSNDATAGPGREFPRPSFVHAPLPPRGSGSGGGTGTRSSPANVLHPMYLRDLRQPLDGGAGSMLTAENNGKPSSSGSPSVINIDLDQERISAAAAAVAQQQQQQQAPPPSQSSQSRSVHGQLRTPTSQAGGSAPSPQQIHTKSITFGELTDSIITSDYGTNPHLRPPYMAYLQETQSILPPDRWKQNRRMQQKAEEAKHHSQQQQQQQHQQQHHAQQQQQQQQQHHAQQHHPQMPGTGSGSAPGGAGQGGGSGGPGSGGGGAGRASTPGEDGRNIIRMPQAVSPRKFNHEMMLHHVMGTTGAGGEAGQFFLPSRVVLPEQRGTPSGGGGAPGAGGPGSGGGATTIEKYVKTRIAEVMRDDIGYGKNRTVEVRTEDEVTADMVAHSHAAVHAAHVAHAAHVAHAAAMELQHRSKEPPPPEISVSRKTPNQYEVVDASGRRSAGSGSVSVSVSGANSHHSPYHPPAAAYAPSTYAFPYSALNVPGAAGGLPPHQPLQLAHQAVAPPGAFAKAKAAHALSELGAVGGGVSLVVGGGSGGIAGGPGGVSVGVGVPGGGGPGSGGGGGGGHNSSSSQASAAVAAAVAAAASESKPLLLSKYDALSDED

SEQ ID NO: 25 - DNA, 3413 bp, Drosophila melanogaster
  Name: CG8045
  AE003721
  GI: 7300335
  Transcript: CT24072
gagtcaattaagggcaaagactcgagcggtgagcgtgcggctctactcccatatatacatatatatatatatatatattcaacatcctaaccgatagaaaagtagcaacagcagcccagttatgtgcttgccaaatgcaattaacaactgattgatttggaaactcagcagcgataatcgagttgaaaatcaaccaaataatacactaaatggattgaaagtgtcgcagtggcaaaagtgttgttagctagttagtgtgtcttgtgtgctgttactgtgcgttccaaggattaaagtcgtggaggagaatggaacacgatagcttcgatgatcccattttcggggagttcggcggcgggccactcaatccactgggcgccaagccactgatgcccaccacaacggccatgcatcccgtgatgctgggcagtgtccacgagttgtgcagccaacagcagcagcagcagcagcagcaacgattgcccgactgcaacaccatactgccgaatggcggaggaggaggagcaggatctggcggcgctggaggatcgcccaactatgtgaccaagctggattttgtcaacaagatgggctgctactcgcccagccagaagtacgagtacattagtgcgccgcaaaaactggtggagcagcagcagcagcagcagcatcatcatcaacatcatcagcactacacggccacgcccccgcccagccacaatggcatcctgctgcacaagcaatcctcccagcagcaacagcagcagcagcaacagctggtgggcatcctggactatcatccgctcaatggcaagctggactactcctcgtcgcccaaagatcagtacgagccgcagcagctgcagcatctgtacggcggcagtccgcatcatctggaccatttggatcatggcagtgatggcttgctccaggactcctcgcccgtcatgatcaacggaggatccgctggtggcaagctaaagaagcccgatgagatgtgttcgcagttggaggcgggtggtgctggagttactccgccaagtagttcctccacggtggttaatggcaccaccaatggcactggcaacgccaactcctcctcctccgctggcgtcggcattcagggggcggcgggcacagcggggggcgtggcagctcctgcagccaaaaaggacggaagcagcagcaagaagaagggcgatcccaatggcatcaagaagaagaagacgagaaccacctttactgcctaccagctggaggagttggagcgtgcctttgaacgtgctccgtatccggatgttttcgcccgcgaggagctggccatcaagctgaatctgagcgaatcccgtgtgcaggtgtggttccagaaccgacgggccaagtggcgcaagcacgagccaccgcgcaagacgggctacatcaagacgagcactccgccgacggcgacactgaatcccggaaccctagccccaccattcactagctacccgcagacgacgacggtcacgccgccgggcagcatggacagctggaccagctaccagacgccctacgaactgacgccccagttcagcctgctctcgccggcggccagtccgtatggcacctattccggccagtacggtgcctatgtgcacgaaagccagctcttcccgatgcgtcactacgagtacggtagtcccacgcgcatggaaatgggcgccacaaccggttcggtggccggaaacggagatgagtcggtggccaatggcggcagctatcagacggcggaactgcagaccgcccagcagcagcaactggccgacggcacactggtcaccgtccatgcccaccaacagcagcagcagcagcagcagcaactcaatggcaagtacctgagcgccgaggaggccaaatacgtgcacctgcagtgccatcagagtggaggtggtctggagctaagtcccggcgccagctgtcatctggtggaggcgcagggccagcactatgtgaccacggcgacgggaggagctgcatccgcgggcggcaccagcagcgatgacaacgacagcggcggcatgcagactgtgatcaagagcgaggaggtctcccaacagcagcagcagcagcagggacagagctacgtcctgccgccttttttgcactgagagaaatgctcacacaccggcgacagcaacaacaccagcgacgctgggccacgcccatcagcacgccgaacgcccgtttccgtcggccattttgaagggatggaggcgtggcgtgtgcagcatttccaactgtgtttctccgactgaaagtggggctccagaaaagcggattcccaaagataaagcctcataagtagtagaattcatcatcggattacttaaaactagttgctttcaaaaaatttggcgagagtccacaaattttatatttaatttgataatattgtttttttagtttatatttccaatcccttggagtttttctagccagtcccacacagtttctagccactgttttcatattgccataggttccttttaggtttaatgacgcaagttgcaacaacaacgggaatccacaagtcttgccaaatcataatgaggttattatgcctgtctaagtctaggttaatctagggctaggggctctgcaacgagagccccgcccccagaatgcattccaaatgtgccttaccaaaacgggtgacgagtgacctccctccaaattggaaagcttcgttgcccaacaaacttagttttagttattctactcgtagactaagttccatttgctgtttttgctgtagttagacaataaagtgctttttatattgtatactagctcatttggctttacaaattttattacttactaattttgtaaaatggcttgcaaattttgttacaactacattcaatttagtttaatttctaattgtaagcaattacataaactaggacactttgcaaatgtatataatagacgtataaataaatcgtattttgtaccaataattgatcagcttccaattcaaaaaaggaacaacataaaagactcataaaaacaaaactgatggttaatacacttgttttcgaagacaagtattaaaagtaatgcatagaaaataatatagcagattcacaacataattaatcgctatggagcgacttcagattctttgaaagtaatcaaaatcaatgccaatcagaactgagcaaggaatcacaaatgggatttcaggtacagtacgaaataagaaaatactttacggactcaatagcaaagcaaatagtgcctattttcacatggactcagttccctgctccaaaaccgcctgccaatcgatgcctttgaagaatggatgagcctgcaattggtcgtagtccaaacgtagctccggagaaagctgcagcagttgctccagc

SEQ ID NO: 26 - protein, 612 aa, Drosophila melanogaster
  AAF55517
  GI:7300358
MEHDSFDDPIFGEFGGGPLNPLGAKPLMPTTTAMHPVMLGSVHELCSQQQQQQQQQRLPDCNTILPNGGGGGAGSGGAGGSPNYVTKLDFVNKMGCYSPSQKYEYISAPQKLVEQQQQQQHHHQHHQHYTATPPPSHNGILLHKQSSQQQQQQQQQLVGILDYHPLNGKLDYSSSPKDQYEPQQLQHLYGGSPHHLDHLDHGSDGLLQDSSPVMINGGSAGGKLKKPDEMCSQLEAGGAGVTPPSSSSTVVNGTTNGTGNANSSSSAGVGIQGAAGTAGGVAAPAAKKDGSSSKKKGDPNGIKKKKTRTTFTAYQLEELERAFERAPYPDVFAREELAIKLNLSESRVQVWFQNRRAKWRKHEPPRKTGYIKTSTPPTATLNPGTLAPPFTSYPQTTTVTPPGSMDSWTSYQTPYELTPQFSLLSPAASPYGTYSGQYGAYVHESQLFPMRHYEYGSPTRMEMGATTGSVAGNGDESVANGGSYQTAELQTAQQQQLADGTLVTVHAHQQQQQQQQQLNGKYLSAEEAKYVHLQCHQSGGGLELSPGASCHLVEAQGQHYVTTATGGAASAGGTSSDDNDSGGMQTVIKSEEVSQQQQQQQGQSYVLPPFLH

SEQ ID NO: 27 - DNA, 1966 bp, Drosophila melanogaster
  Name: CG8045
  AE003721
  GI: 7300335
  Transcript: CT24102
ttcggaattcttggtttttttccaagagagttatgtccctggtgccagaagcctctacctcgagagcgcccaagtactgctacttcttcaagaccctgctggtggaggaactggagctggaaacttcctaccacaacctgcactacggtcagtgcgcattaattggacgtctggcgttcaaggcgaatcagtaccgcctagaaaacgtgcgcgttaagtgtttgccaaagaagtactccttgggcgagggcaccgtatccttgcttattcttggccttacccatgacaaagtcgtcgaaaatcgcgtgagtaccggccgctactgcattgtgcgtggtgaagtggtgctacataatgtgcagcatcccaaaggtgccaaactgaccgccggcggtgtctacgacaagatcaatagtctgtccaacgatccgttggcccaaaaacagtatctcagcgcgctacttgccacctacagaccggccatcgacttatggtacatccaggtcatcgacagagccgaggacttgctgactcgcaggctggagatgagaagtctgatcgagaaatgaacacacaccacctgaccacctcgcgaaccaatccgcagttctatatattcagtcagctctttggtaacgatttcgactggaataattgcaattgggggggcattcaaaacgttacctggaaagaattctggcagcgtgaggggcatgagctgctcgagcaaaagtggcacaagcggtttcccgaatacaaagatcttatcgaggtggtttcgtcggaggagcaaggcctttggcaggaactgtgggagaagcacgccagcgattacagtgaaaagttctggtatatatttagctgtgcctttgagaactaccaacacgatttggccaaatcatttggccttgacgtcgctgaaaactcagaagatgttgaggaggacttgcagaacctaagccttacaaataagccaataaaatcgaaacagcaaagggtcacagagaaagaggaggacgaatcatacttgactgccaacgacgatcccgaggattgtgacgaggaacaacagctgcgccttctcggattgccaacatcatttgcgtcgaaggcagatataattaattatagaaaggaaagaaagacacagtacgaactatctagcagcgatagcgaggacgatcatgatctgttgaccatggagaacaacgaaaacgaggctctgcacggcgttcagagcggttctgttaaaaagaaaaaacgacggcaaaggcaaataaaaaaactcaaggccaggatgccagagtgcatgcaagaggataacaacaaaatggtcaagtactgggtcaagcgattctcgctgttctcccgcttcgatcagggcattcggctggaccgcgagagctggttctcggtgacacccgagaagattgccaaacaaacggcccgacgactggcctgcgacgtgatcgtagatgctttctgtggatgcggcggcaatgccattcagtttgcaaacacctgtggacgcgtaattgctgtggacatcgatgccgagaagttggccatggccaagcataatgccggcatttatggtgtggcccataagatcgagtttatccacgccgattttctgcagtttgcggccagcacaaagctgcgcccaaatgtggttttcctgagccctccgtggggtggtcctgactaccaaaagcaggccacctttgatatcgaaacaggtctcctgcccgtgggtgctagccaactgatgcagctgtcccgtagcctggcatctgacgtagctttctttctgccacgcaacgccaatatgaagcaggtggtcgctctaagtggagttgggcagcagtgcgaggtggagcacaactatctggacacccgaatggttgcgctcactgcttattatggtaaaggaatcataaagggttcagtgggagaagatgagtag

SEQ ID NO: 28 - protein, 262 aa, Drosophila melanogaster
  AAF55519
  GI:7300360
MTERENNVYKAKLAEQAERYDEMVEAMKKVASMDVELTVEERNLLSVAYKNVIGARRASWRIITSIEQKEENKGAEEKLEMIKTYRGQVEKELRDICSDILNVLEKHLIPCATSGESKVFYYKMKGDYHRYLAEFATGSDRKDAAENSLIAYKAASDIAMNDLPPTHPIRLGLALNFSVFYYEILNSPDRACRLAKAAFDDAIAELDTLSEESYKDSTLIMQLLRDNLTLWTSDMQAEEVDPNAGDGEPKEQIQDVEDQDVS

SEQ ID NO: 29 - DNA, 1513 bp, Drosophila melanogaster
  Name: CG8045
  AE003721
  GI: 7300335
  Transcript: CT24092
ccgccgcccgatacggtcacaccgctcgagaagtagagaaaaaagaaggcgacgaaccacaggcagcaagcaaaatcgacgccgcacgtaccgggagcatttaaataattttttctgtggattaattttaccgaaaaggcttcaacacaatgactgagcgcgagaacaatgtgtacaaggcaaagctggccgaacaggccgagcgctacgacgaaatggtggaggccatgaagaaggtcgcctccatggacgtagagctgaccgtcgaggagcgaaatctgctgtcggtggcgtacaagaatgtgattggagcacgccgtgcctcgtggcgcatcatcacctcgatcgaacagaaggaggagaacaagggggccgaggagaaattggagatgatcaaaacctaccgcggacaggtggagaaggagctgcgcgacatctgctcggatatactgaacgtgctcgagaagcatctcattccatgcgccacatccggcgaaagcaaagtattctactataagatgaagggcgactaccatcgctacctggccgaattcgccaccggctccgaccgcaaggatgcggcagagaactcgctgattgcctacaaggcggccagcgatattgccatgaacgatctgccaccaacacaccccatccgtttgggcttggcattgaacttctcggtgttctactatgagattctcaactcgccggaccgcgcttgccgcttggcgaaagccgctttcgatgatgccattgccgagttggatacactgagcgaagagagctacaaagactcgacactcatcatgcagctgctgcgcgacaacctcacattatggacgtccgatatgcaggcagaagaccccaacgcaggtgatggcgagcccaaagagcaaatccaggatgttgaggatcaggacgtgtcgtaatttaagtaaacccccgcccttccatttaaaacacattatataccttctaaagtaaatataataccatataatatatatgcatacaacaacaacaacaaaatcaacaacaacacgacaacaacttcaagaacaacaacatggaaccaatgcggcaacaacaaccatagcagtcgatcaccacaacagcagcacccgtatgtgtatcaacatatttgcaacatgataacagcaagcaaagcagcaggaacacaaattgtcatccacaataaacagcatggaaaacaacagcacaaaaacagaaaaaaaaaacaactatccaagcaaaatgtttgaaaattgggcggcctggtgggcgtggcgcggctgttgctgcggcccagaatcgaatcgcaacataaaaaattcgcggtactattaagttggcgtcgcttcgcaatttggctccttaacgttagaaaactgcaacatcaagtctactacatttgaattttttgcattcgagaaaccaagcattttattatatttgaataaatattatatttaattatgagaagcaaaaacgaaacaaataaaattcattt

SEQ ID NO: 30 - protein, 491 aa, Drosophila melanogaster
  AAF55523
  GI:7300364
MVHPGHRQSRGLADSQAGDEKSDREMNTHHLTTSRTNPQFYIFSQLFGNDFDWNNCNWGGIQNVTWKEFWQREGHELLEQKWHKRFPEYKDLIEVVSSEEQGLWQELWEKHASDYSEKFWYIFSCAFENYQHDLAKSFGLDVAENSEDVEEDLQNLSLTNKPIKSKQQRVTEKEEDESYLTANDDPEDCDEEQQLRLLGLPTSFASKADIINYRKERKTQYELSSSDSEDDHDLLTMENNENEALHGVQSGSVKKKKRRQRQIKKLKARMPECMQEDNNKMVKYWVKRFSLFSRFDQGIRLDRESWFSVTPEKIAKQTARRLACDVIVDAFCGCGGNAIQFANTCGRVIAVDIDAEKLAMAKHNAGIYGVAHKIEFIHADFLQFAASTKLRPNVVFLSPPWGGPDYQKQATFDIETGLLPVGASQLMQLSRSLASDVAFFLPRNANMKQVVALSGVGQQCEVEHNYLDTRMVALTAYYGKGIIKGSVGEDE

SEQ ID NO: 31 - DNA, 1384 bp, Drosophila melanogaster
  Name: CG10420
  AE003751
  GI: 7301280
  Transcript: CT29244
ctgaaatctgatttaaaaactctcacgaaacttacttaaaaccaggtgaaataaagactgaatacattctggaggcaagacaagctgaagcagtatgagtggcaagcaggtagtcatccttctgggcagtgtcctgatcctgggatgcttacaagtggcagcggcaacggaaacggataacaaaaccaacgatttcgtggccaccgacgaatggcagacgattgcggaaggtcaagctattccaaggggcctgcacgtgcgcatcaacctacaaacggggctcaaggaagccaaactcttagacgaaagcgaacgtggcacgtcgctgcagagtcaaccggatgatcagaatgctcgggaatctcacgatgacaacgaacccctggctctggactataaaccggacataatcgaggagtctatacggcgggtcaaggagcagaagaagagctatgccgagctacgcaaagcgtacaaagagttccagaagaactttcgcaccgacggagaactgatcgtccagttaatcgatcagtttcggaacttcagcagaacgccgctagagtcagagatgcgctccaagctggactgcctggaaaatctggagtatttgctccatcagatagacaatgccttgatgttcattgataatgggggattggatgatgtactactgcccattgttgtgaacgataccagtacatccctgagagtgtcggccatgcgtgtgttgggctcgctggcgagcaacaatcccaaggcccagatcaaggtgttcgaaaagaatttcgggtctcatctggctcagattctgaccagttccggaaatgtcggtgagatctccgctgcattgcacgcctttggagccttgttgcggaaatttccgctagcccagcagcgagtgctttccacctcgggtacacaggctctgatcaaggtgctccagagtccggatgtggagctgcggagcaaggcgaaggtagtgactctcataagcgacctagtgctggagaagcggtcagtgctggatgtcagcaaagatgatcccgaagcctcatccacaatggcgcaatatgtgctcttggacttcgagtcgtggctgaaaacgccgggctactgcgcggcggtggacactgtgctaaccaaggagttcctgctcctcctagagcaaccggaggtggtggaacagtttgccaccgcattggagaccaccgaagatatgtgcaccagcacgtggtcgcaaagttccggtctcaggcatgcactattaaccgttcgcaatcggtatgccaacagcacggacgagtaccgactggaggtgtcccagattttggccaaactgtgcgagagattgttcaacaagcccaagcacaccgaactgtaa

SEQ ID NO: 32 - protein, 429 aa, Drosophila melanogaster
  AAF56422
  GI:7301293
MSGKQVVILLGSVLILGCLQVAAATETDNKTNDFVATDEWQTIAEGQAIPRGLHVRINLQTGLKEAKLLDESERGTSLQSQPDDQNARESHDDNEPLALDYKPDIIEESIRRVKEQKKSYAELRKAYKEFQKNFRTDGELIVQLIDQFRNFSRTPLESEMRSKLDCLENLEYLLHQIDNALMFIDNGGLDDVLLPIVVNDTSTSLRVSAMRVLGSLASNNPKAQIKVFEKNFGSHLAQILTSSGNVGEISAALHAFGALLRKFPLAQQRVLSTSGTQALIKVLQSPDVELRSKAKVVTLISDLVLEKRSVLDVSKDDPEASSTMAQYVLLDFESWLKTPGYCAAVDTVLTKEFLLLLEQPEVVEQFATALETTEDMCTSTWSQSSGLRHALLTVRNRYANSTDEYRLEVSQILAKLCERLFNKPKHTEL

SEQ ID NO: 33 - DNA, 1920 bp, Drosophila melanogaster
  Name: Hsc70-2
  AE003698
  GI: 10726497
  Transcript: CT23565
atgggtaaaattccggccatcggcatcgacttgggcaccacctactcctgtgtgggagtttggcagaacagcaaggtggagatcatcgccaacgatcagggaaaccgcaccacgccctcgtatgtggcattcaacgagacggagcgcttgattggcgatccggccaagaaccaggtggccatgaatgccaagaacacggttttcgatgccaagcgattgattggacggaagttcgacgacaagaagatacaggaggacctgaagctctggcccttcaaggtcatcaatgagaagggaaagccgaagatcgaggtggagttcaagggcgaacggaagcgatttgcccccgaggagatcagttcgatggtgctgaccaagatgcgcgaaatcgccgaggtctatctgggtggcaaggtgaaggacgcggtggtcacagtgccggcctacttcaatgatagccagcgtcaggcgaccaaggatgcgggctccattgctggactgaatgtgctgaggatcatcaatgagcccactgcggcagctctggcctatgggctggataagaatcttaagggagagcgaaatgtgctcatcttcgacttgggcggcggcaccttcgacgtctccgtactgagcatcgatgagggttccctgttcgaggtgaaggccacggccggcgatacccatttgggtggtgaggatttcgacaaccggttggtcaatcattttgccgaggaattcaagcggaagcacaagtcggacatcaagggaaatgccagagcgttgagacgcctgagaacggcttgtgaacgggcgaagaggacgttgtcctccagcacggaggcatccttggagattgatgccctgcacgagggcattgacttttactcgaaaatttcgagagcgcgtttcgaggagctgaacatggacctcttccggtccaccatgcagccggtggagcgggcactgagcgatgccaagatggacaagaaggccattcatgatgtggtcctggtgggcggctccacgcgtattcccaagattcagaaactactgcaagatctgtttggtggcaagcagctaaatctttcaatcaatcccgatgaggcggtggcttatggagccgccgtacaggctgccattctcaccggcgtgggcagctcacagatccaggacctgctcctcgtggacgtggctcccctttcgctgggcatcgagaccgctggcggcgtgatgaccaacttggtggagcgcaatgcccgcattccctgcaagcagcagcagatcttcaccacctacagtgacaaccagaatgcggtgaccattcaggtgtacgagggcgagcgggccatgaccaaggataacaatctactgggcacctttaacctcaccggcattccgccagctcctcggggagtgccccagatcgaggtggccttcgacttgaatgcggatggcatcctgaatgtgaatgccaaggacaacagcaccgggaagagcgaaaagatcaccatttccaacgacaagggcagactttccaaagcggaaatcgatcgcatgctctcggaggcggagaagtacaaggtcgaggacgatcgtcagagggagcgggttcagtccaagaacaatctcgaggcatacatctacgcatgtcgccaggccgtcgacgacgctccatccggcgttctttccgaaaccgaacgctccaaggtgcgcgacaagtgctcctccgaggcatcctggctggacaagaactcgctggccgagaaggaggagttcgagagtcacctgaaagagtgccagcgcatctgtactccaataatgtcgaaaatccatggcggcaaaaagggcaaatcatcgatgggcaagggttcccatcccactgtggaggaggtggatggatagtacgatccaccgacctaa

SEQ ID NO: 34 - protein, 633 aa, Drosophila melanogaster
  AAF54899
  GI:7299717
MGKIPAIGIDLGTTYSCVGVWQNSKVEIIANDQGNRTTPSYVAFNETERLIGDPAKNQVAMNAKNTVFDAKRLIGRKFDDKKIQEDLKLWPFKVINEKGKPKIEVEFKGERKRFAPEEISSMVLTKMREIAEVYLGGKVKDAVVTVPAYFNDSQRQATKDAGSIAGLNVLRIINEPTAAALAYGLDKNLKGERNVLIFDLGGGTFDVSVLSIDEGSLFEVKATAGDTHLGGEDFDNRLVNHFAEEFKRKHKSDIKGNARALRRLRTACERAKRTLSSSTEASLEIDALHEGIDFYSKISRARFEELNMDLFRSTMQPVERALSDAKMDKKAIHDVVLVGGSTRIPKIQKLLQDLFGGKQLNLSINPDEAVAYGAAVQAAILTGVGSSQIQDLLLVDVAPLSLGIETAGGVMTNLVERNARIPCKQQQIFTTYSDNQNAVTIQVYEGERAMTKDNNLLGTFNLTGIPPAPRGVPQIEVAFDLNADGILNVNAKDNSTGKSEKITISNDKGRLSKAEIDRMLSEAEKYKVEDDRQRERVQSKNNLEAYIYACRQAVDDAPSGVLSETERSKVRDKCSSEASWLDKNSLAEKEEFESHLKECQRICTPIMSKIHGGKKGKSSMGKGSHPTVEEVDG

SEQ ID NO: 35 - DNA, 6291 bp, Drosophila melanogaster
  Name: CG10805
  AE003615
  GI: 7297167
  Transcript: CT30278
atgagtactgcgttggcacagcagctgcagaaactggctgcgccgcagtcgtcggtaactttggcagatgcacgaagtcgcgcctccatactcttcgatcccaaggaggcggccaccaaggatcggcggtccatttatgagatcgggttaacgggactgcaggagctgaccgactttaatccggccttcaaggagttccagctaacgttgttcgatgaggccacattgacgctggagcgttccgtggagctgccggagattaacaagatgctggacgcggccattgcaaagtttctgcgccttctttcgccgtaccttctgctccgccccgcacacatggccttcgaatggttgctgcgacgattccaggttcacgagtataaccgtagcgaagttatggccctgattctgccctatcacgagacaatgatctttgtccagatcgttaagaccatgaggctccggtcatcggatggcgactggtactggctgcgcccgttgcagcgtcctggcgttccgctagccaagactgctattattaacagagccgccagcaatcccgccttcctcggcttcatctgccaaagtacccagaaggcggttaaggaactgggtcctcgagcccaccaactgcaagcccagatcaacttctatgccaccgtcgtagttggcgccctgcaaacggccaaaccactgcaggactggcacatcaccactattctggagtcgctgcttcgtggcctgatttccgataatatcgactttatggcggccgcctatgtgatcgttgctcagcttgtttcccgcaccaagctcaagagcaaggtgtgcaatgccctgctggaacgcgtggccaactgcccgtttgagaggcttcacagtgagtcgctgctcctgcttgtctgcatctatggcaaacagcaagccgcattgccgcactttaagccggaaaccatactcaatctggttgggaagaagtggcttatctccactctgtcctccctggccaaaggcaacatcgccatccagtctatctgcatgccactcatgaccggagccgtggccgccattcgggacgatgacgcctcttctaactcatgcaaactgttcttggacaacctgctgtcagaggtgccaatgccaaagccgactgctcagcaactgatcaattgctttttggatacttatgtagagactgcgatcgatgcaccagagcccatggaaactaactcaaacgaagatgacgataccattgtaattgattcggatgatgagatcgagacggaaaagaccacctttcaagcctggtattccacttacctcgagaagctggagagacgctatccagaagcttttgatctgagcgttaaagaggccttgagatcgaaatcctccacaagcaatcgccagaaggccttaaagttggctttgggcttccgtctcaacactactgatgaaaaagcgaagcacgcctacgaaaaactataccactacagcgctgactggcgacttagtgctgttcagaaactactccagaatttgaatgtgactaaaaagcgggagagaagcgttaagcttctgcaggaatgtctgcccgataggataaatgatgatagcggtgctgtggtctcaaccttgctatcattgcctaccgaagagctcgccgagatgttgggtccgttgcctctggctcaaaccctatgtcatctgctgtatcgtgctcagtccgaaaaggatgaggaatggcaacctgtggttcccctcgctgttcgtcacttgacctctgccttggtgagcggaagctatgacacaaatttggtgctattagcgctgatgccgcttctcttccctggcgaagcattagctgaacatcagcacaaggctctgcggattctacttggcagtgattttgtcagtaaagttccgttcttggcagaacttaaagtgagcaacaaattcagcgactttaatgtcggtgagcaccgtcagcacttcctggacatcatagcgagcagcaatcaggaactgagtagtcaggaacgtgcgttgctccaaagcgtagaagatcatggcggtgagttgtacattcagaaagcctcccagctgacgcacctgttactcctgctaactgcctacgccaagagggaactacagcctcgggaaagccttcacatgctggagaaaattgggctttatagtcggcgcctccagttccgtgtcgtcaatggtagtcaaaacacacagaattgtgcacctctacaattgtatgtggatttcctattgactttggttaagaacaccaaatggacagctctagcatccactccttggaatcagatgaccgatgagcttcgcctctgtctgcgcctgctggaaataatatgcgcccaagtgttttcggaaaaagctgatcagccagagcgtcaggagtggacacgagccctgcagcaaagtttgcaactaatcctgcctgaagctcaagacagattggaagtgctatcaaacttctatgtgttcgagcgactgccagaattgtggcctcgagactctgactatgccgtgttccggttgcaagggtttattattctagaagcggtgctgtccaatccgaaatcccaaatagactgcggtctggttcatgtgctgcgggtggccaacgcctgtggatctcccttacaaactctgcgagtgcaggccattaacattctgcaattaatcagtaatcgcaagctggtgagccatgtggagcaattggtgcgttcgctgctgcagcgcaagagtgagttgagcatggatcatgaacaatatgccctgattctatacaccattctggaaccagagaaggcaactgccaaggaaagactcgtgctgtcaaaactgaaacgatctgttttggctttggcctccgatccgaagcagtctcccatttgtacggcgtctttgcttgcggccctaaagcacgtcaacgatgagaatttcttaaacgaattgctgccgctgggtcttgactccctgaagacgataactgcgggagaagacaaccagaatataaaacagctgccatggccacatagcgaaatctacaagtcggtgatagaaaggtttgaggggcgtgttgcgctgaatgtattgctgcgaaaggatctggcttggaaattgtttgaagacagcttcgcccagtatgacacctatgtccaacttgaacagaagctacagcctcttccctgcgtcctgctaaacagcctcacgccggagacctttgagcaaatgcatgccaagcacaagattgctctaatcaagctgatagtggagtcggctaccaattcggacaatgacagcatattcttggctagccatcgtttgctgaagcgctgccgtttggattgccagccactcgtaccgatcctgttggagatggccaacaccaaggtggagaagaaacaacccgtcaaacgacgatcagtacaggcaacccaactggatctaaccagcccatactggaagcagggaatgacccttctcgagctgttggagcacaagaaacagctggttggagcggagctgctgatcccaccgctcttcgaacttctacaggcctgtcttacgatggaagagcatagtgccgccgagtatcccaagcagctgattctctcaagcttgctgcactgctgtcagacggcacagtcggccggtgtgcagctcgttaaggctatgcctgaatctagcttccgcatcgagctggtggtgcaatccttgaggaatacccgaaatccgcagacccagcagcatgcgctgcttttcctgactcactgtgctggcatgtatccgcaacaagttctacacaagatcgttgaaatctttacgttcgttggatccacggtggcgcgacacgacgatgccttcagcctgcatataattcacaatgtggtggagtcgattatacccattctgcttctgaataccggacataatgagctggttatacccgtgcttaaggtgttcgctgatatttgcacggacgtgccggtccatcggagattgccattgtatgctaccctgttccgagttctggagcccaaggagcacctttggcagttcttgtgcattatctttgagtctcaagtgcttctggagcaagttccacaaaaagtgtccacagacaagtcgcggctggactttgcccgtgaactgacgttgatgttcgaagatccgacggtcgcaattcagacgtgcatccgtctattggattacttggccaagttgccggcaaccaaaagcagtctttcgggtggatcaggctcctctgtgctaagcacggaacaacagctctttgatgttcggacacggacgttcaagcaactgcggcactacaagtacctcatcatggacttcctttctggaattagcagctgcaacgaatgggagaagaagatgaagcgtcctgatcccaacgagctacttccgtattatcaggaattcatcctaaagacactcgcgtatgtgggcgtacttaatggagcattggaagcagcctccgaaacgccttctctggaaaagttctggcgcgtgctagctaaccatgcacacgatgtcttggataacgccatcggtcttttggcaccgcaacatttcatcagtgtgataaccgagctactgaagcatgatcatgtgtatgtgcgcattaaggtgatggacttgttggtgaccaagctaagtccgtcgagcgattacttccagcaatccaacgctgaacactttggagtgcttttcgctcctttgcaagagattatcaacggaatcctcgagggcagttccaacagtgcgcagcaggcgaagcttcaacagactgcgttgcatgccctacagttgttggccctccgtcacggacgcgactacatcgaggagtgtcgctctcttctggccaccttgaccaagatcaccaaacgacgtgcgaacgtgcccaaggcggtagtgggcaatgtggtgctgaccctcgtcgaaatttgcgcaagtcttaaggcccatgccttggcccaattgcccaagttcgctccccaacttactgagttactgaaggaacaggttcaccaaatggcctccctcaaacaaggaccagattacgtctgttccacccttgtcacagcactccacaagctcttcaaggcgttgccgcttttcttgggaccctacttggtggacattatcggaggcttggcgcgcctttcagtgcaattggaaaatccacagctgctgcaggataagcgcacacaggtgcttaagcagaaacttgcggacgtttggagtgcagttgcccagggcgtcgaggtgcgcattcttgtgcccagttgcgccaaggcgttctccagtctattagagcagcaagcgtacgacgagctaggacatctaatgcagcagctgttgctgcagagcgtccgacacaattcagccgctcaattgcaaccggttcaggatcccctaagcgagctcttcctgcaagcactcaacttccggctgcaagtgcgtggacttggtttgcagaggcaattggtttcggatgtagaggcttccataaccgagacctttgtgacgtggatcctaaagttgtcagagaccagtttccgtcccatgtactctcgggtacataagtgggcactggagagtacctctcgggaaacgcgtctcacctacttcctgctgaccaaccggatcgccgaagctctaaaatctttgttcgtgctatttgccagcgatttcgtggaagactcttcgcgcttgctgacggagcacaactcaatccgtcccgagttcgaagtcgaagaaagggaagatgatgtggacctgttaatggcaatactgaacactctgcatcatgtgttcttgtactgcagcgaggacttcattaatgaccaccgcttcaacgtgttaatgccaccgctggtcaaccaattagaaaacgacctggtattgggaaatgagtcgcttcagcaagttctcagtaactgcattgcccagtttgcggtggccaccaacgatgtgatgtggaagcagctcaacagccaagtgctcctaaagacacgcacatccaatcccgaagtgcggattctggcattcaacagttgtgtggctatcgcgcgcaaactgggtgaaagctatgccgccctgttgccagagacagttccattcatcgctgagctcctggaggacgagcatcaacgtgtggagaagaacacccggactggagtgcaggagctagaaactattttaggcgagtctgtgcaaaagtatctataa

SEQ ID NO: 36 - protein, 2096 aa, Drosophila melanogaster
  AAF52447
  GI:7297181
MSTALAQQLQKLAAPQSSVTLADARSRASILFDPKEAATKDRRSIYEIGLTGLQELTDFNPAFKEFQLTLFDEATLTLERSVELPEINKMLDAAIAKFLRLLSPYLLLRPAHMAFEWLLRRFQVHEYNRSEVMALILPYHETMIFVQIVKTMRLRSSDGDWYWLRPLQRPGVPLAKTAIINRAASNPAFLGFICQSTQKAVKELGPRAHQLQAQINFYATVVVGALQTAKPLQDWHITTILESLLRGLISDNIDFMAAAYVIVAQLVSRTKLKSKVCNALLERVANCPFERLHSESLLLLVCIYGKQQAALPHFKPETILNLVGKKWLISTLSSLAKGNIAIQSICMPLMTGAVAAIRDDDASSNSCKLFLDNLLSEVPMPKPTAQQLINCFLDTYVETAIDAPEPMETNSNEDDDTIVIDSDDEIETEKTTFQAWYSTYLEKLERRYPEAFDLSVKEALRSKSSTSNRQKALKLALGFRLNTTDEKAKHAYEKLYHYSADWRLSAVQKLLQNLNVTKKRERSVKLLQECLPDRINDDSGAVVSTLLSLPTEELAEMLGPLPLAQTLCHLLYRAQSEKDEEWQPVVPLAVRHLTSALVSGSYDTNLVLLALMPLLFPGEALAEHQHKALRILLGSDFVSKVPFLAELKVSNKFSDFNVGEHRQHFLDIIASSNQELSSQERALLQSVEDHGGELYIQKASQLTHLLLLLTAYAKRELQPRESLHMLEKIGLYSRRLQFRVVNGSQNTQNCAPLQLYVDFLLTLVKNTKWTALASTPWNQMTDELRLCLRLLEIICAQVFSEKADQPERQEWTRALQQSLQLILPEAQDRLEVLSNFYVFERLPELWPRDSDYAVFRLQGFIILEAVLSNPKSQIDCGLVHVLRVANACGSPLQTLRVQAINILQLISNRKLVSHVEQLVRSLLQRKSELSMDHEQYALILYTILEPEKATAKERLVLSKLKRSVLALASDPKQSPICTASLLAALKHVNDENFLNELLPLGLDSLKTITAGEDNQNIKQLPWPHSEIYKSVIERFEGRVALNVLLRKDLAWKLFEDSFAQYDTYVQLEQKLQPLPCVLLNSLTPETFEQMHAKHKIALIKLIVESATNSDNDSIFLASHRLLKRCRLDCQPLVPILLEMANTKVEKKQPVKRRSVQATQLDLTSPYWKQGMTLLELLEHKKQLVGAELLIPPLFELLQACLTMEEHSAAEYPKQLILSSLLHCCQTAQSAGVQLVKAMPESSFRIELVVQSLRNTRNPQTQQHALLFLTHCAGMYPQQVLHKIVEIFTFVGSTVARHDDAFSLHIIHNVVESIIPILLLNTGHNELVIPVLKVFADICTDVPVHRRLPLYATLFRVLEPKEHLWQFLCIIFESQVLLEQVPQKVSTDKSRLDFARELTLMFEDPTVAIQTCIRLLDYLAKLPATKSSLSGGSGSSVLSTEQQLFDVRTRTFKQLRHYKYLIMDFLSGISSCNEWEKKMKRPDPNELLPYYQEFILKTLAYVGVLNGALEAASETPSLEKFWRVLANHAHDVLDNAIGLLAPQHFISVITELLKHDHVYVRIKVMDLLVTKLSPSSDYFQQSNAEHFGVLFAPLQEIINGILEGSSNSAQQAKLQQTALHALQLLALRHGRDYIEECRSLLATLTKITKRRANVPKAVVGNVVLTLVEICASLKAHALAQLPKFAPQLTELLKEQVHQMASLKQGPDYVCSTLVTALHKLFKALPLFLGPYLVDIIGGLARLSVQLENPQLLQDKRTQVLKQKLADVWSAVAQGVEVRILVPSCAKAFSSLLEQQAYDELGHLMQQLLLQSVRHNSAAQLQPVQDPLSELFLQALNFRLQVRGLGLQRQLVSDVEASITETFVTWILKLSETSFRPMYSRVHKWALESTSRETRLTYFLLTNRIAEALKSLFVLFASDFVEDSSRLLTEHNSIRPEFEVEEREDDVDLLMAILNTLHHVFLYCSEDFINDHRFNVLMPPLVNQLENDLVLGNESLQQVLSNCIAQFAVATNDVMWKQLNSQVLLKTRTSNPEVRILAFNSCVAIARKLGESYAALLPETVPFIAELLEDEHQRVEKNTRTGVQELETILGESVQKYL

SEQ ID NO: 37 - DNA, 1664 bp, Drosophila melanogaster
  Name: elF-4a
  AE003612
  GI: 7297037
  Transcript: CT26044
agcctcttttgcttggttttaacaaatcagtagcagcacgtgtataaaaagtgccaaataattttcagaaaatggatgaccgaaatgagatacctcaggatggccccgccagcatggaacccgagggcgtcatcgagtccacctggcacgaggtgtacgacaacttcgatgacatgaacttgcgcgaggagttgctgcgcggcatctacggttatggtttcgagaagccgtcggccatccagcagcgcgccatcattccctgtgtgaggggtcgcgatgtcattgcccaggcccagtcgggaactggcaagactgccaccttctcgattgctatccttcagcaaatcgacacgagcattcgcgagtgccaggcgctgatcctggcccccactcgcgagttggccacgcagatccagcgcgtggtgatggcgctcggcgagtacatgaaggtgcactcgcacgcctgcattggcggcactaacgtgcgcgaagacgcccgcatcttggaatccggttgccatgtggtggtgggcactcctggccgcgtctacgacatgatcaaccgcaaggtgctgcgcacccagtacatcaagctgttcgtgctggatgaggccgatgagatgttgtcccgcggtttcaaggatcagatccaggatgtcttcaagatgctgcccccagatgtgcaggtcatcctgctgtccgccaccatgccgccggatgtgctcgaagtgagccgttgcttcatgcgtgatcccgtcagcatcctggttaagaaggaggaactgacccttgagggtatcaagcagttttacgtcaacgtgaagcaggagaactggaaactgggcaccctttgcgatctgtacgatacgctgtccatcacccagtcggtaatcttctgcaacacccgtcgcaaggtggaccaactgacccaggagatgtctatccacaacttcaccgtctcggccatgcacggcgacatggagcagcgtgatcgcgaggtcatcatgaaacaattccgttcgggctcgtctcgtgttctgattaccactgatttactggcgcgcggtattgatgtgcagcaggtgtcgttggtcatcaactatgatctgccctcgaaccgcgagaactacattcatagaattggtcgcggtggtcgtttcggtcgcaagggtgttgcgatcaactttattacagatgatgatcgacgaatccttaaggatattgaacagttctaccacacaacaattgaggaaatgcctgctaatattgccgatttgatttaaattttttctgctgagccgcaaaacaactaagaaagaattctaaacaaaaagtgagtgagcaaaacagcaaacaagaactgcgaaatcgataaccgagcgcaactataaattattcaaagatcaacaagtcaagttaaatatttattattcaaatattaattcgaaaaggcagccgaccgaccacccaaaaaaaggactaaaccaggacagagcagcaacatcttcagcagcggcgcagcagcagtaacatcagcagcagcggaagcggcagcaacaccaccaccaattgccgattagccggaacccctctgtatccatttagttctctgtgtatcatcaattttaaaactgcgttgtcaaccagcaacaacaaatatatac

SEQ ID NO: 38 - protein, 403 aa, Drosophila melanogaster
  AAF52317
  GI:7297048
MDDRNEIPQDGPASMEPEGVIESTWHEVYDNFDDMNLREELLRGIYGYGFEKPSAIQQRAIIPCVRGRDVIAQAQSGTGKTATFSIAILQQIDTSIRECQALILAPTRELATQIQRVVMALGEYMKVHSHACIGGTNVREDARILESGCHVVVGTPGRVYDMINRKVLRTQYIKLFVLDEADEMLSRGFKDQIQDVFKMLPPDVQVILLSATMPPDVLEVSRCFMRDPVSILVKKEELTLEGIKQFYVNVKQENWKLGTLCDLYDTLSITQSVIFCNTRRKVDQLTQEMSIHNFTVSAMHGDMEQRDREVIMKQFRSGSSRVLITTDLLARGIDVQQVSLVINYDLPSNRENYIHRIGRGGRFGRKGVAINFITDDDRRILKDIEQFYHTTIEEMPANIADLI

SEQ ID NO: 39 - DNA, 3554 bp, Drosophila melanogaster
  Name: ACXA
  AE003638
  GI: 7297983
  Transcript: CT38108
taaaaaaaatactacttaaaaatatgaacaaaaaaaacacttacaaaacgccgtacagggaaaggtttaggcgatgtaatctggaatatactaatgaacgcctttgggaacaaagttatttgaaggccagatgtaaggagttgcacttagaggaggaatatatgaaatataagattcgtttgatgatcagttcccttaccgtttttgtccccatgttaatactactgatcgtagctcttcaagtaatcatatggtcatttaccgagtatacaaaatacatctatataaatgcgatatttgacttgggatcattaattttagtcacgggcctactaagcataaatttctttgaagactttgtaatccgccacagatgggtcatgactttcacctcgactttgtcggcatatgttgtggtattgggtgatatagcctttaacacttattattattacaaatccaactggcctcttaataccttatacgatgtctttgtgctctgcatgatctacatgttcctgccaataccttcgagcaaggcagcagctctgctagccatatctgttagtttaacatatgtgatatattttattcacttcatggcgtttaacgagcataatgttgctaaatatgttcatggtctggatatagtatcaatcgatttttttcactacctgggcttcaatatgatgggaatattcttcagaatcatgaacgacaccatggtgcgctcgtcgttcttggaccgataccagttcattacggaggagatttggctacgccaagctcgccgtcaagaatccttgctgctggatagcatacttccaccacagattgcgaagcccattcagaaaagcattaaggaaaagatcatacagcccgataacgacttctaccatctgggcacttcgcggacagcagaaaacttcatgtccatccagattcacaacgatgtcagtatcctttatgctgatctggtgaactacacccaattgaccacaacattgacggtggagaagctggtgaaggtcctgcacgacctctacgccagatttgatttggctgccttatctttcaaggtgcagcgcatcaagttccttggcgattgctactactgtgtggcgggtttgggggaatctgatcctgatcacgccaccatggctgtgtctctgggaatttccatgattgctaacattaaggaggtgagtgtgaatcgttctttgaatattggcatgcgaattggtgtccattcgggaactttgtttgcaggtgtaatcggcaaggccaagctacagtacgacatatggggtgccgacgtgaatattgccagtcgtctggaagcaaccggaagtcccgggtatgtgcatgttagtggacgaactctgagcagcttgaacgctgaggaatacaatatatatccgggcacggaatcggcccagaaggatcccgtactgcagaaacatccgatgagcacctacctcctcaccgctataccatccctcgattcggataaaacaattagcatagttgagggcgttcctaacctggaccttcaaaccgtgggatctaaccgaaaatcacagattttgaagcctaacttactgtcccatgagatgcgtgaggaatttagaaagatgccggtggggggtttcaaatttcaattcccttggtcgcgaagagaaagaaatttgaaaaacgagaaagtcgaacgcgatttgggcattttttgtgtcgcatttaaggacaaatctgtggaatggaattatttgcatcagcccgattatatttttaaatattcagtggcgctcggctggggaattggttgctgtcttatttatatccagtccgtgaacaactcagatatcttttatacgggtgttgtcattaacattatcgcgtttttcgtcctgactttcctactattcatttgctggtacaagaaagtgtgctggtggcatagtggacaaaacgagcacaggagttacggcaaactcagctgcgccatattccacttgtttgaaaagatccagcacagttttgtccttcgcctcactgtctacatgatgataatattgtgctattacatggtgatctccttgatattaatgagctgtgaaaaggaccaatatgagttggacattatagagagcaagctctacaactatgacatggatccgtttacctgcttccacccctgggcctatacgaacatgatggcccttatcctgggaatgagttacaccttcgcccgcattcccttcgccctcaagacctttatcggttgcgccgaagcagtggttttcgtcctggttgtgtgtttccagtacgcgttcattttcgagcacagtgttaccacatcgccctatttaaaggctgaaatagctcattcctgcagggtgtgcatgatgttgattactatgtacgctaaggagcgtcagtcagagttcaacactaaaatgaactacaagctcaacctggacttgcaaaacaagcaaaaatcggccgatgtaactaaccagtccatcataatcctgcttaacaacattcttccatctcatgttgtcgaggtatatctcagctctatagccaaacacgaactctattatgaaaactatcgaatggtatcagtcatgtttgccatgctcacaaactttcaaatggatttgcccagcttaagagtgctaaatgatatcatcacagcgttcgacagattgctttctgcgtacaagcaatattacgtagtcgagaagatcaaagtcgtcggatgcacttatatggcagcctgtggattggactttagcctgattgaaaaccttgatagcaactcgaattttggcagtacatcattgtcatccgaattagaacaggtgcgttctcgtttggagtcatctataaaagagaagaaccatgatgaggtggcttttataatggctacgtttgctctggacctgatgcgcgttctgtcggtgtgcaacaaggcttacgccggagaaccatttgatcgggctttgtccaccggcgagataaggatcggtatctctacgggtcagataatggctggagtggtaggcgcttcccagccgcactacgacatctgggggaacccggtcaatatggcctcccgaatggaatcgactggtttgtctggacatatacaggttacaaaggagactgcccaaacgctcgaggagttcgatgttatgtgctattatcgcggcttaacctttgtgaagggtcgtggtgaaattcccacctattttgtgggcatcgataaagacctaaagttcatgtccaagaaaatcgatagactttctgagaacccatctaatccagatctaaaccatgacctggacggctcctaagacagatacaaattttttcggcaaattcttctcaatatggaattcgaatcgcaaatgcatattgaaggcttcgtttctcaaattttgagatcgtagttcttgtctgtaaaatttgagatgcgtagccttacaaaatgatgtggactcaaatcttgtaaaaattatgtggaaaatacatatttgtaatacctt

SEQ ID NO: 40 - protein, 1112 aa, Drosophila melanogaster
  AAF53228
  GI:10728753
MNKKNTYKTPYRERFRRCNLEYTNERLWEQSYLKARCKELHLEEEYMKYKIRLMISSLTVFVPMLILLIVALQVIIWSFTEYTKYIYINAIFDLGSLILVTGLLSINFFEDFVIRHRWVMTFTSTLSAYVVVLGDIAFNTYYYYKSNWPLNTLYDVFVLCMIYMFLPIPSSKAAALLAISVSLTYVIYFIHFMAFNEHNVAKYVHGLDIVSIDFFHYLGFNMMGIFFRIMNDTMVRSSFLDRYQFITEEIWLRQARRQESLLLDSILPPQIAKPIQKSIKEKIIQPDNDFYHLGTSRTAENFMSIQIHNDVSILYADLVNYTQLTTTLTVEKLVKVLHDLYARFDLAALSFKVQRIKFLGDCYYCVAGLGESDPDHATMAVSLGISMIANIKEVSVNRSLNIGMRIGVHSGTLFAGVIGKAKLQYDIWGADVNIASRLEATGSPGYVHVSGRTLSSLNAEEYNIYPGTESAQKDPVLQKHPMSTYLLTAIPSLDSDKTISIVEGVPNLDLQTVGSNRKSQILKPNLLSHEMREEFRKMPVGGFKFQFPWSRRERNLKNEKVERDLGIFCVAFKDKSVEWNYLHQPDYIFKYSVALGWGIGCCLIYIQSVNNSDIFYTGVVINIIAFFVLTFLLFICWYKKVCWWHSGQNEHRSYGKLSCAIFHLFEKIQHSFVLRLTVYMMIILCYYMVISLILMSCEKDQYELDIIESKLYNYDMDPFTCFHPWAYTNMMALILGMSYTFARIPFALKTFIGCAEAVVFVLVVCFQYAFIFEHSVTTSPYLKAEIAHSCRVCMMLITMYAKERQSEFNTKMNYKLNLDLQNKQKSADVTNQSIIILLNNILPSHVVEVYLSSIAKHELYYENYRMVSVMFAMLTNFQMDLPSLRVLNDIITAFDRLLSAYKQYYVVEKIKVVGCTYMAACGLDFSLIENLDSNSNFGSTSLSSELEQVRSRLESSIKEKNHDEVAFIMATFALDLMRVLSVCNKAYAGEPFDRALSTGEIRIGISTGQIMAGVVGASQPHYDIWGNPVNMASRMESTGLSGHIQVTKETAQTLEEFDVMCYYRGLTFVKGRGEIPTYFVGIDKDLKFMSKKIDRLSENPSNPDLNHDLDGS

SEQ ID NO: 41 - DNA, 2486 bp, Drosophila melanogaster
  Name: CG15117
  AE003797
  GI: 10727456
  Transcript: CT34995
cggtgcgtccgcttcgcctcgcggtttatagtttcaaatagtttgtttttgtaattaccggcaaaacacttgaaccgattattaatagtcgcgaaatgactgccaatttctaaccacttgtgttcgagttttaattggaaacgaaaatagttcctaagtgcacaaaaccgattccggattttaattatactcgcaaagttacatcgatcattcgccggaatcctgcacggaatactcgaatatggctctgtccatcttctccctggtcactggtctttatgtcctgcacttctccatagctctgatcctggtcaacaaagaggtgccccaaacgcgcggaatgctgtaccccagggaatcggagacgcgggaggtgcgatctctggacgggatctggaactttgtgcgctccgaccaggcgaatcccacgcagggcgtccgggatgagtggtatgccaaggagttgagcaagagcaggcccacaatacccatgccggtgccggcatcctataatgacataaccacggacaatttgagggatcacgtgggcacagtgtggtacgaccgcaagttctttgtgccccgatcgtggtcaaaggatcagaggatatggctgcgattcggcagtgttcactatgaggcatatgtgtggatcaacggccagaaggtggtgaagcatgaaatgggtcacctacccttcgaggcggaggtcaccgatcttctgagctatggagccgagaatcggatcaccgttatgtgcgacaatgctctgattcagacaactgtgccgcagggcaggattacggaagtgcccaacgatggtggcatgaccattgtgcagagctacacctttgacttctttaactatgcgggaatccacaggagcgtgcatctttacaccacgccccgtacttttatcgaggaggttgaggtcaccacaaacctttcaaaggatgccaccgttggcgaagtgttctatagcgtaagcgtgaatggcagcgctgccaacgaggcagataatgtcttgcaaatccaggccaatttgtacgataaggatggcatattggtggcgaatgccacgtcggaccaaaaacttggcggcaagctgcaagtgaacccggtgaagccctggtggccctacctaatgcattccgaaccgggttatctgtaccagctggagatcaaattgctggcgaccaacgatgagctcctggatgtctaccgactgaaagtgggaatacgcacactaagttggaacagccagcagttcctgatcaacggcaagcccgtttacttccgtggttttggacgacacgaagattcggatatcaggggtaagggtctggacaatgcactgatggtgcgcgatttcaatctgctcaagtggattggagcgaatgcgtatcgcacgtcgcattatccctactccgaggagtccatgcagtttgcggatgagcacggcatcatgatcatcgacgaatgtcccagtgtggatacagagttgagttattccgacacctcgaagggattcttactaatgctcttggcttcgattttcagaaactttagccaggagctgctgggcaagcacaaatcgtcgctggagcagctcatccatcgggatcggaatcatccaagtgtggtgatgtggtccattgccaatgaaccccggactggtagcgtgagtgcggattcgtactttgaattagtggccaacttcacacggtctctggataaaacccgacccatcacggctgccattgctgtttcaaacacccaggataaggcgggccgctctctggacatcatcagcttcaatcgctacaatgcctggtactcaaatgccggacgtctggacatgataacccagaatgtgatcgacgaggccattgcctggaataaacgctacaacaaacccattatcatgtctgaatatggagcagataccttggagggcttgcatatgcaacctgcttatgtgtggtcggaggagttccagacggaggtgttttcccgccattttaaggccttcgatgagctgcgcaagaagggctggttcattggcgagtttgtatggaactttgcggactttaagacagcacaaagctacacccgcgtgggaggcaataaaaagggtgttttcacccgcgcgcgccaacccaaagcggcagctcatctccttcgcaaaagatactttgcattgggcagagatttggaccagtgcagcttcccggaagatctcttcacctacatcgccgatctgatatcctaatggttgggagccagttgatggtgcccaaagtattcggccactgtaaataagtttaccgagaaaaactttatcctcggacttgcattttagcccgactaccattccgctgcattgccctgtacaatataaaatggttagctctagttgattgtatttttgtatgtatttgtatgtttaagagaataaatgaaagtgcattatttatatttaccac

SEQ ID NO: 42 - protein, 656 aa, Drosophila melanogaster
  AAF57602
  GI:7302519
MALSIFSLVTGLYVLHFSIALILVNKEVPQTRGMLYPRESETREVRSLDGIWNFVRSDQANPTQGVRDEWYAKELSKSRPTIPMPVPASYNDITTDNLRDHVGTVWYDRKFFVPRSWSKDQRIWLRFGSVHYEAYVWINGQKVVKHEMGHLPFEAEVTDLLSYGAENRITVMCDNALIQTTVPQGRITEVPNDGGMTIVQSYTFDFFNYAGIHRSVHLYTTPRTFIEEVEVTTNLSKDATVGEVFYSVSVNGSAANEADNVLQIQANLYDKDGILVANATSDQKLGGKLQVNPVKPWWPYLMHSEPGYLYQLEIKLLATNDELLDVYRLKVGIRTLSWNSQQFLINGKPVYFRGFGRHEDSDIRGKGLDNALMVRDFNLLKWIGANAYRTSHYPYSEESMQFADEHGIMIIDECPSVDTENFSQELLGKHKSSLEQLIHRDRNHPSVVMWSIANEPRTGSVSADSYFELVANFTRSLDKTRPITAAIAVSNTQDKAGRSLDIISFNRYNAWYSNAGRLDMITQNVIDEAIAWNKRYNKPIIMSEYGADTLEGLHMQPAYVWSEEFQTEVFSRHFKAFDELRKKGWFIGEFVWNFADFKTAQSYTRVGGNKKGVFTRARQPKAAAHLLRKRYFALGRDLDQCSFPEDLFTYIADLIS

SEQ ID NO: 43 - DNA, 1144 bp, Drosophila melanogaster
  Name: BG:DS01759.2
  AE003642
  GI: 7298121
  Transcript: CT35241
atgcagtactcctatctactggcaatctgtgtcagcttgctgcttctgaagctgaagggagcagctgccacttctttatccgccgaaccgactccggaacttttgaatgcggccaagcaaataggtttagatgaagttggcttgcgagaaatgtggcacagccagcagccgctggttatcagaactcaaaacgatgctggtcaagtcaccactttgacctatgagttaggtccggatttcagatcgattttaagacgcaaggtctcagagggaatactgcctgctaggctagaggataattcaggctctaagccccagcaagattgggagtatgtgccgagtgccggtcgtcagttccgtcccattggagattccaacttcggtacaggtaatttcgagacaaagatatttagcactgaatttccgagatttccgaattgggagctgccagcgggagttactccgaaagttacaaccaagacggaaacggatagctcgggacgcaaggtgaccaccacaactagaacttatagcggcattctggtcccaggcagtaatgtattcaagcagatattccccgacatctccagagagcctggtccaattaacacagactcaaaccatccagccgagaatcctaacacctcagtcttttccccatctcgttccccatctactggacctattgatttcaactatgtatataattcccgaccaagccaaagggaacccgtctttgtgccagtgattgactcaaccaccacgcagcggacttcagttccccggttcagttcagcattaccaagagacgacggatcagatcgagtcatagatgattatttgaaacaagtgaatctgagtgcctcagaaattgagaattcgaatggtgaagtggtcaagactattgtggataagaatggcagaattctaactgccagatttgttctaagctcagtcaaaggaaccaacgaaggatctcagcagcagaggccgaccaagtaaatagctcattataaatattaatatatggaaatcatcgcaatattttgtaaacaatgcttagcgcagtttaataaataagcttatcagcctgggctaaacccagaaattgtaataaaatttctaaatcaatctatcactgaaa

SEQ ID NO: 44 - protein, 333 aa, Drosophila melanogaster
  AAF53376
  GI:7298138
MQYSYLLAICVSLLLLKLKGAAATSLSAEPTPELLNAAKQIGLDEVGLREMWHSQQPLVIRTQNDAGQVTTLTYELGPDFRSILRRKVSEGILPARLEDNSGSKPQQDWEYVPSAGRQFRPIGDSNFGTGNFETKIFSTEFPRFPNWELPAGVTPKVTTKTETDSSGRKVTTTTRTYSGILVPGSNVFKQIFPDISREPGPINTDSNHPAENPNTSVFSPSRSPSTGPIDFNYVYNSRPSQREPVFVPVIDSTTTQRTSVPRFSSALPRDDGSDRVIDDYLKQVNLSASEIENSNGEVVKTIVDKNGRILTARFVLSSVKGTNEGSQQQRPTK

SEQ ID NO: 45 - DNA, 4745 bp, Drosophila melanogaster
  Name: TepIII
  AE003618
  GI: 7297264
  Transcript: CT21827
ctttcaagcggacaacaggtgatcgcgactgtttcgcagaaaaggtgaaaatcgcgtacaaccgagagcgagtaaagtcgccccaaaaacgcgcacctcgtcttgggcaatctacggtgcttttattttggtgctgctgcaatctggcgtgagagtgagatagtgttcggcagcggtagtgcgagtgagaagcagcaacgcgcctgcccacggcaataaagttcgacttgatttttgttttaatatgtgatgccaatacacaattcgacaatcgagaaaacgtgtttacacttaattttgctaacgtgatttaaagacaaaccaaaaatgcgcctccagggagcggatatgggcgctattccagtgctaatcttagtcaccgcttgtttgctttgccaaacatctgcccagggtttatactccatcattgctccgaatactttgcgtccgaactcgcaatttcatgtggctgtgagcttgcacaatgcacctgaatctgccacatttaaggtgggaatcctggggagctcttacacggactttaagaccgtggagttacggcccttttccacacagctattgcactttgagattcccgccttaagaactgacagatatcgcctaactgctgagggccttggaggagttcagtttaccaatgagactcaactgcactttgagtccaaacaacatacggttttggttcagacggacaagagcatctacaagccaggcgatttggttcactatcgagttcttattttggatgccaatctgaaacccgcgcgtggctatggacgtgtgcatgtggatatcaaggactccggtgataacattatacgcagctacaaagacattcgtctgaccaattccatttactcgaacgaactgcgattgtcggactccccgcgttttggcacttggtccattgtcgtggatgtttcggatcaagagcatacgcaaactttcgagatccttgatcatattctaccaaaattcgttgtagacatcgatacacccaagcacgctatttataaggatgggaaaatagcagccacagtcagagcgcactatgcatttggccagccaattgtgggtgaagccaccctatccatttatcccactttctttggctcgctccaaccttttgttaacgatctcatcacccgaaaagttgtgccaattgatggtaatgcgtactttgagttcgatatagagaatgagctccatctgaagcaggactatgagcgacaataccttttggatgccctcgttgaagaaaagtcaactggttcggtgcaaaactattcaacagtcttgacactgcacttgaaccattatcgcgtggaggccgtcaaggtgcccagctactatattcctggagtgccctttgaagctacagctcgcatagcccgcaatgatggcggccaattgagggacttcaatccccaaatcaccgcatatttgacgaatgtctatggcagcagtgagatgtacaaccgtactgcctatagcctggatgccagtggagagatcaagatgaagttcactgttccgattggagatcgagatgaatttcattccataatagttgactaccagggcgtgatcagtgaggaaatttctgtggtcgtacgctcctttgcgcccattaaatattttatgtaccaagttgtcggtcgcggcgatattatactgtctcgcaatgtggatgtaagtaaatattttttgtaccagaagtttattatgctttatcgatttggtaacttttccaaggtggcccctgggactttccacacaatcaaattcctggcatcatttgcaatgatgccgagagccaatctgctcgtatatacggtaatagatggggagtttgtttacgatgagcaggtcatacagcttgaagaaaatctactcaatgcggtacaagttgacgctcccattagagcacctcctggtcaagatattgacataggcataagcaccaaaccctactcatatgtgggcctcatgttagtggatcaaaatgcaaacgaccttaggagtggtcatgatttaacccacaaacgactgatggatgctctgcgttcatacgaactgagcgatgtgaacactccaatgggatcacctggcaaggagtctggtgtgataaccatgtccaatacggattactttatcgaaaaggaagctgagagcaatccggctttggatcgagaggtttccaccgggcccgaggaagacaaattaacgactgtgcgaaaaaccgacattggacctgcccacaagatcgaggttaatacgttgcctcctggaaaaggccgatacgccttttcttataccccaaagcccttttggcataatccaagggtccatgtgatgcgcgatcctgcggatacgtggctcttcttaaacatctccgccagcagcgatggaaggaattcaatccacagaaggattcccagtgagatgacatcctgggtggtttccgcctttgctctggatccggtgaacgggttgggattatctccgcccaatggaaaattggaggcctacaaagagttttacataagcaccgagttgccctactccataaaaagagatgaactcattgccattccgtttgtggtgcacaacaatagggacagtgatttgaacgtggaggtcacgttttacaactcagcgctggactttgatttcccacaactggatcctaaggccaccaaccaaccaaaggtggaactctacagacgtagatccttgcaggtaccgggacgatccgcccgctccgtgtccttcatcgtgactccgaagagagtggggcccctcttggtcaaggcaatggctgcctcctcccaggctggcgatacagtcgaacaaaatctgctggtggagcaccctggagccatggagcggatcaacagaggattcctcttcgaacttaactccaatgcccagaatagaaggaacgtcaccattgcggttccacgcaacgccattccggaatccacacgtattgaagtatcagccgttggcgatctcattggcagcttagtgggtaatctggatagccttatccttctgccaacaggctgcggcgaacagaccatgcgccttcgtcaactcacgcccgaagtggaactgcgtgccacaaacaatctggctataggctaccagagaattctttattatcgccatgagaatggtgccttcagtgcatttggattagatatcaagcggagttccacctggctgacagcgtacgtggctcgctcacttcgacaagcggctccattcactcaagtggatagcaatgtcctgcaaaaggcactaacctatttgggaagtgttcaatcagcaaacggtggcttcgaggagcgtggcgacgtattcgagagatttggcgacgatggcatcagtctgactgcatttgtgacactggctctgatggaaaatgtggatctgtatcccgaatatcgaaacaacatcaacaaagccctggactttatcaccaggggcttagatggatcaaatggcctcaagtggtggaacaaaacggcgcccgctggtgagcaacaatcaccctggtataatgccactcgtagcgtcaacattgagatctccgcttacgccgccttggctctactggaaaataacttggtgggcgatgccctgcccgtcttgaactggttgatggaccagcgaaatcccaaaggtggttttgtggcatcgcaggatactgtagtcggccttcaggcgcttctcatgttcgccgaacgcttttccagtcagggcaataatctccaaatcggcttccattacggagaaggcgctgaaacgataattaatgtgaatgccgaaaactcactagccctgcaaacggtggagctgccaaacaatcttaaaaacttgagtgtttcggccactggtcggggaatggcattggcccaagtcagctacacctataacacaaacgtgaccagtgcctggccacgatttgtactcgatcccactgtgaatcggaactcccatgcggactacctccatctttcggcctgtgccagctttgtttccgtggtgggcgagaacgagcagcgctccaacatggccgtgatggaggttcacctgcccagcggtttcgtcgtggacagggatacacttcccaccctggagtcgagtgagcgcatcaagaaggtcgagacccagaacaggaacaccaaagtggtcatctactttgattacctggacagaagggaggtgtgtcccaccctgcacgcttacaagacggtcaaggttacaaaacatcgaccggtggcagtggtcatgtacgactactatgacagcgctcgccgtgccagacagttctacagggcacccaaatccaatatctgtgacatttgcgagcacgccaactgcggtgacctatgcgaaaaggccgagaagcgcgagtccaagcgacctgatgactacacggcgatagcgggtcatagttcagggtcaagacacacagccattccactggcatctgtggttatggttctgtcgatgcttttgaaaacccttagctgttagacgatactgttaccgccacttaacgtggaaccaatatggaaatcgaagctttaacaacacccactcacatagtccctaagttagcctaatgaatgccgtgaactaaacctgttctaagtacatctaacgatgctaaagtgttgccaataaagtgttataacgtttactaaaaccag

SEQ ID NO: 46 - protein, 1469 aa, Drosophila melanogaster
  AAF52542
  GI:7297279
MRLQGADMGAIPVLILVTACLLCQTSAQGLYSIIAPNTLRPNSQFHVAVSLHNAPESATFKVGILGSSYTDFKTVELRPFSTQLLHFEIPALRTDRYRLTAEGLGGVQFTNETQLHFESKQHTVLVQTDKSIYKPGDLVHYRVLILDANLKPARGYGRVHVDIKDSGDNIIRSYKDIRLTNSIYSNELRLSDSPRFGTWSIVVDVSDQEHTQTFEILDHILPKFVVDIDTPKHAIYKDGKIAATVRAHYAFGQPIVGEATLSIYPTFFGSLQPFVNDLITRKVVPIDGNAYFEFDIENELHLKQDYERQYLLDALVEEKSTGSVQNYSTVLTLHLNHYRVEAVKVPSYYIPGVPFEATARIARNDGGQLRDFNPQITAYLTNVYGSSEMYNRTAYSLDASGEIKMKFTVPIGDRDEFHSIIVDYQGVISEVGKIPSKHLHSKNYITAKVLNDRPTVNQEISVVVRSFAPIKYFMYQVVGRGDIILSRNVDVAPGTFHTIKFLASFAMMPRANLLVYTVIDGEFVYDEQVIQLEENLLNAVQVDAPIRAPPGQDIDIGISTKPYSYVGLMLVDQNANDLRSGHDLTHKRLMDALRSYELSDVNTPMGSPGKESGVITMSNTDYFIEKEAESNPALDREVSTGPEEDKLTTVRKTDIGPAHKIEVNTLPPGKGRYAFSYTPKPFWHNPRVHVMRDPADTWLFLNISASSDGRNSIHRRIPSEMTSWVVSAFALDPVNGLGLSPPNGKLEAYKEFYISTELPYSIKRDELIAIPFVVHNNRDSDLNVEVTFYNSALDFDFPQLDPKATNQPKVELYRRRSLQVPGRSARSVSFIVTPKRVGPLLVKAMAASSQAGDTVEQNLLVEHPGAMERINRGFLFELNSNAQNRRNVTIAVPRNAIPESTRIEVSAVGDLIGSLVGNLDSLILLPTGCGEQTMVNFVPNLIVLRYLGRLRQLTPEVELRATNNLAIGYQRILYYRHENGAFSAFGLDIKRSSTWLTAYVARSLRQAAPFTQVDSNVLQKALTYLGSVQSANGGFEERGDVFERFGDDGISLTAFVTLALMENVDLYPEYRNNINKALDFITRGLDGSSNLHAMAIGTYVLSRANHNAKAAFLQRLDSMATNKDGLKWWNKTAPAGEQQSPWYNATRSVNIEISAYAALALLENNLVGDALPVLNWLMDQRNPKGGFVASQDTVVGLQALLMFAERFSSQGNNLQIGFHYGEGAETIINVNAENSLALQTVELPNNLKNLSVSATGRGMALAQVSYTYNTNVTSAWPRFVLDPTVNRNSHADYLHLSACASFVSVVGENEQRSNMAVMEVHLPSGFVVDRDTLPTLESSERIKKVETQNRNTKVVIYFDYLDRREVCPTLHAYKTVKVTKHRPVAVVMYDYYDSARRARQFYRAPKSNICDICEHANCGDLCEKAEKRESKRPDDYTAIAGHSSGSRHTAIPLASVVMVLSMLLKTLSC

SEQ ID NO: 47 - DNA, 2371 bp, Drosophila melanogaster
  Name: Hsc70-4
  AE003708
  GI: 10726541
  Transcript: CT13958
cgcaaattttgtacgggtgtaattcagaaaaaaacgccagccagtttgatcgaaggtgcggcagattaaaagtgaagtagcaattaaacggttatattttagtactttctaagaaacaacacacaagatgtctaaagctcctgctgttggtattgatttgggcaccacctactcgtgcgtgggcgtgttccagcatggcaaggtcgagatcatcgccaacgaccagggtaatcgtaccactccatcctatgttgccttcaccgatacggagcgtctgatcggagatgccgccaagaaccaggtggcgatgaacccgacccagacgatcttcgacgccaagcgcttgattggtcgcaagttcgatgatgccgccgtgcagtctgacatgaagcactggcccttcgaggtggtcagcgccgatggcaagcccaagatcgaggtgacctacaaggacgagaagaagaccttcttccccgaggagatctcttcgatggtgcttaccaagatgaaggagaccgccgaggcctatctgggcaagactgtgaccaacgcggtcatcaccgtgccggcctacttcaacgactctcagcgtcaggcgaccaaggacgccggcaccatcgccggtctgaacgtgctgcgtatcatcaacgagcccactgccgctgctatcgcttacggtctggacaagaaggctgttggagagcgcaacgtgctcatcttcgatctgggcggcggcaccttcgatgtgtccatcctgtcgatcgatgacggtatctttgaggtcaagtccacggccggagatacgcatctgggtggtgaggacttcgacaaccgtctggtcacccacttcgtgcaggagttcaagcgcaagcacaagaaggatctgaccaccaacaagcgtgctctgcgtcgtctgcgcaccgcttgcgagcgtgcaaagcgtaccctgtcgtcctccacccaggccagcattgagatcgactctctgttcgagggtaccgacttctacacctcgattactcgtgcccgtttcgaggagttgaacgctgatctgttccgcagcaccatggaccccgtggagaaggctctgcgtgacgccaagctggacaagtcggtcatccacgacattgtgctggtcggtggctccacccgtatccccaaggtgcagcgcctgctgcaggatctgttcaatggcaaggagctgaacaagtcgatcaatcccgatgaggctgtggcctacggtgctgccgtccaggccgccattctgcacggcgacaagtcgcaggaggtgcaggatctgctgctgctcgatgtgactcctctgtccctgggtatcgaaaccgctggcggtgtgatgagcgtgttgatcaagcgcaacaccaccatcccgaccaagcagacccagaccttcaccacctactcggacaaccagcccggtgtgctgatccaggtgtacgagggagagcgtgccatgaccaaggacaacaacctgctcggcaagttcgagctgtcgggcatcccccccgcaccacgtggtgtgccccagatcgaggtcaccttcgatatcgatgccaacggtatcctcaacgtgactgccctggagcgttcgaccaacaaggagaacaagatcaccattaccaacgacaagggtcgtctctccaaggaggacatcgagcgcatggtcaacgaggccgagaagtaccgcaacgaggatgagaagcagaaggagaccattgccgccaagaacggcctcgagtcgtactgcttcaacatgaaggccaccctcgacgaggataacctgaagaccaagatctcggactctgaccgcaccacaatcctggacaagtgcaacgagaccatcaagtggctggatgccaaccagctggctgacaaggaggagtacgagcaccgccagaaggaactggagggtgtgtgcaacccgatcattaccaagctataccagggcgccggtttcccacccggtggcatgcccggcggtcccggaggtatgcccggagcggctggtgccgctggcgctgccggagccggcggtgctggccccaccatcgaggaggtcgactaaaccattcacccccacacctcaatgcaaccatacagtaacagttctccaaacaatttaccaaccaaacacagtagaagagttgcttaaacaaacttggattctaaattaggaactcgccaaacatacaaacgggtcaaacgacaactgctccccgtagttcatttatataaattataaattcatactagaacaaaaccaaacacactgctccataatagtatatattatattattgtcatcgatcgatcatccaaactatttgcttgtacttgaattcaataaataaat

SEQ ID NO: 48 - protein, 651 aa, Drosophila melanogaster
  AAF55150
  GI:7299978
MSKAPAVGIDLGTTYSCVGVFQHGKVEIIANDQGNRTTPSYVAFTDTERLIGDAAKNQVAMNPTQTIFDAKRLIGRKFDDAAVQSDMKHWPFEVVSADGKPKIEVTYKDEKKTFFPEEISSMVLTKMKETAEAYLGKTVTNAVITVPAYFNDSQRQATKDAGTIAGLNVLRIINEPTAAAIAYGLDKKAVGERNVLIFDLGGGTFDVSILSIDDGIFEVKSTAGDTHLGGEDFDNRLVTHFVQEFKRKHKKDLTTNKRALRRLRTACERAKRTLSSSTQASIEIDSLFEGTDFYTSITRARFEELNADLFRSTMDPVEKALRDAKLDKSVIHDIVLVGGSTRIPKVQRLLQDLFNGKELNKSINPDEAVAYGAAVQAAILHGDKSQEVQDLLLLDVTPLSLGIETAGGVMSVLIKRNTTIPTKQTQTFTTYSDNQPGVLIQVYEGERAMTKDNNLLGKFELSGIPPAPRGVPQIEVTFDIDANGILNVTALERSTNKENKITITNDKGRLSKEDIERMVNEAEKYRNEDEKQKETIAAKNGLESYCFNMKATLDEDNLKTKISDSDRTTILDKCNETIKWLDANQLADKEEYEHRQKELEGVCNPIITKLYQGAGFPPGGMPGGPGGMPGAAGAAGAAGAGGAGPTIEEVD

SEQ ID NO: 49 - DNA, 2651 bp, Drosophila melanogaster
  Name: CG7069
  AE003738
  GI: 10726692
  Transcript: CT21853
tttcggtgtatcaaaatttattcaaaattcatccatacgcaagaatccttagtccagggtccacagtgcccatatgttccacttgcctgttaaacctaagatatcgctgctatgccagcaaatgcaagaaagagaagaaaccaccgaagttccgactggaccgcggaccattcgcctcccagttggattaccagtcgcgactgcagtaccaagcacctgccctgagtatccccctcagcagcatcatatgcaccattggaccctcatccaacagcccagaaaagctattggagctcatccgggctgggatgcgggtcgtgcgtatgaacttctctcacggctctcacgagtatcactgccagacaatacaggcggctcgtaaggccatcgccatgtacgtggagcaaacgggtctgcccagaacattggcaattgctctggacaccaagggtccagagatccggacgggcaaactggccggtggcaatgatagggctgagatagagctcaagaccggagacaaagtgacattgagcaccaagaaggagatggcagacaagagtaacaaggataatatctatgtggattatcagaggctacctcaactggtcaaaccaggaaatcgggtatttgtagacgacggattgattgcattgatcgtgaaggaatcaaagggagatgaagtgatctgtcaggtggagaacggtggcaagctgggctcccacaagggaatcaatttgccaggagttccggtagatcttcccagcgtaacggagaaggataagcaggatcttaaatttggggccgagcaaaaggtggacatgatcttcgcatcgttcatacgagacgcaaatgctctgaaggaaatccgccaagtacttggaccggctggagcgtgtataaagatcatctctaagattgaaaaccaccaaggtctggtaaacatagacgacattatccgtgaatcagatggcataatggtggcccgaggtgatatgggcattgagatacccacggaggatgttcccctagcccagaaatcgattgtggctaagtgcaacaaggtgggcaagcctgtgatctgtgccacccagatgatggagtcgatgacgaacaagccgcgacccactcgtgccgaagcctcggatgtggccaacgctattttcgatggctgcgatgccgtaatgctgtccggtgaaacggccaagggcaagtatccggtggagtgcgtccagtgcatggccaggatctgtgccaaagtagaagcagttctatggtacgaaagcctgcagaacagccttaaaagggaaatccggaccagtgctgccgaccacatttcggcagttaccacggcgatcgcggaggcggccacggtgggccaagcccgggcaattgtggtggccagtccgtgctccatggtggcccaaatggtcagtcacatgaggccgccatgtccaattgtcatgctcacgggtaacgaatccgaggcggcccagtctctgctctttcgcggcatctacccactcctcgttgaggaaatggttattggcagctttaactttcgacgcatcatgcagtcgggcctgaagctgatgggcaagatggacatcttggagccgggtcagaaaggatcggtggtgctggttaatgccatgtcggcagaaaagatcaccttccggctgttcactatccgtcagcagaccaaggaagaacgcgatcaggatgagcgatgccgaaaattggccctagagcagagctgcaaggagagggctgaaaaggaggaatgcagaaagctccagcaagcggaagaatgtcagaagcaaaaactggccaaaaaatgtaaacagttcgaagagaagcaaaaggtctgccccaaaaagaatgatactccgaagaatgattgtccgaagaaagattgtccgaagaaagaatgtcccaagcaagatgacgaaatctcaaagtgcaggcaaatgcaagaagcggaagctgaagaaaggaagtgcaaagaagagtttgaacagatgtgcaaattagctgaagaaaaaaggaaagaagctgaaaaatgcaggaaagcggacgaagaacgaaggaaagaggaagctgaaaagtgcaggaaattggaagaagataggaaatgcaaattggctgaagagaagaaaaggaatgaagaagaacttaagataatagaagcagaagtggccaaactggaagctgctgagaaggccaagcgtttgaaggaggaagagaaaaagaaggaagaactaatgaagtgcaagcaacgaaatgaagcgaaaaaaaagagggaagaggctgaaaggtgcaagagaaaggaaagagaaagggagctagctgaaatggaaaacaaatggaaacaggttgcggagaaaagaaagagaaagaaggcagcagagatgtgcaggaaaatagaggatgcaaaagaaaaagccgcggcagaatcggctgataagattctgaaagctgtgtgcgaaaaactaaagcaatctctctcggatccggacaaatcaaaaaagggcaagaaataaagtgaaagctaatggcagatttatatggaacattttaacttttaatacggtgttacacaccgaattccaaattattatataaaactattggaattttttaaattttct

SEQ ID NO: 50 - protein, 744 aa, Drosophila melanogaster
  AAF55980
  GI:10726696
MRVVRMNFSHGSHEYHCQTIQAARKAIAMYVEQTGLPRTLAIALDTKGPEIRTGKLAGGNDRAEIELKTGDKVTLSTKKEMADKSNKDNIYVDYQRLPQLVKPGNRVFVDDGLIALIVKESKGDEVICQVENGGKLGSHKGINLPGVPVDLPSVTEKDKQDLKFGAEQKVDMIFASFIRDANALKEIRQVLGPAGACIKIISKIENHQGLVNIDDIIRESDGIMVARGDMGIEIPTEDVPLAQKSIVAKCNKVGKPVICATQMMESMTNKPRPTRAEASDVANAIFDGCDAVMLSGETAKGKYPVECVQCMARICAKVEAVLWYESLQNSLKREIRTSAADHISAVTTAIAEAATVGQARAIVVASPCSMVAQMVSHMRPPCPIVMLTGNESEAAQSLLFRGIYPLLVEEMVIGSFNFRRIMQSGLKLMGKMDILEPGQKGSVVLVNAMSAEKITFRLFTIRQQTKEERDQDERCRKLALEQSCKERAEKEECRKLQQAEECQKQKLAKKCKQFEEKQKVCPKKNDTPKNDCPKKDCPKKECPKQDDEISKCRQMQEAEAEERKCKEEFEQMCKLAEEKRKEAEKCRKADEERRKEEAEKCRKLEEDRKCKLAEEKKRNEEELKIIEAEVAKLEAAEKAKRLKEEEKKKEELMKCKQRNEAKKKREEAERCKRKERERELAEMENKWKQVAEKRKRKKAAEMCRKIEDAKEKAAAESADKILKAVCEKLKQSLSDPDKSKKGKK

SEQ ID NO: 51 - DNA, 2715 bp, Drosophila melanogaster
  Name: ACXE
  AE003638
  GI: 7297983
  Transcript: CT38110
atgctgcatatattcgttacctccgtgcactgtgccctacttttagcaacgattgagcgccgatcaattatttatttcgatgtagccctttccataggatgcgcattggtccttatacttgtgctgagtgttaacttctgcgatgaatttattgcgaaacacacgtggtacatgtatgccagctcgatatttgcctccctgactttggtattcgctgacctaactgaatcaatttaccacacgtatgcgcacagctggatactgggcacattttacgacacctacataatatacatgatatacatgttcctgccgatccacttcatcagcggtgcagtcctgctggctctgttggtgtccggtctctatatactctactttgtgatcttcattgcccagggcttcgcccagtttgcgtctgcactattctcggtcggcggaatgtcggtggacattgtgcactatctgtgcctaaatcttgtaggcattttctaccgcgttatgaacgacacggtggtgcgctcctcctttctggaccgacaccagtacatcaaggagaagatttggctgcgcaacgcacggctgcaggagaagcagttgctggacagcatcctgccgccgcagatctccctgcccctgcagaaagacattcagggcaggatcgtaatggcaaagcaaggtattcactcctggaccgccatggagcgcacaatggccatacagatccatcccgatgtctccatcctgtatgcagacgtcgtgaactacactcacttgactaccacactgacggtggagatgttggtgaaggtcctgcacgatctctacggcagattcgatttggctgcctatcgctacaaggtgcagcgcatcaagttcctgggggactgctactactgtgtggcgggtctgtcggaccccgatcccgatcacgccaataactgtgttatcctaggtctttccatgatcaaccacattatggaggtgcgggacattcacggcttggacataaatatgcgcattggagttcattcgggcaatctgtttgctggggtcatcggggaggccaagctgcagttcgatatatggggattggatgttaccatagccaatgttctagaatcaactggagtgccgggatgtgtgcacataagtggtgccaccttaaacaatctagacgttaatcgcttcgatattgaggatggacctgaagaagccagggatcatcctcttctgaaaaaataccgaataagatcatatataattcgacaagacttgcatatggatgacgaagatagtgacgagtttctcggcgatctgcattcaatttctctgtgcaatatgggagctcagccaagaataagtgattctgctaatcaaagtctaagggcgcttttccacgaagaattgcgggaagagtttcgcaaaatgccgatgagctgccaacgcgaagaattcgagatggcatatatcgaggaaagactctttcactatgaacaggaggcccatatatgctttcatccctgggtgacgaccaatatgttatccctgatgatttgtttgaccttcacattcgcccacatacccatcatggtcaagacggcagtggccattttggagacgctcgcctatctgctgttgattttcttccagttcgatttcgtcttccatcacagcgttacgacaaacccctatttcaaatcggagtacgctcatgccctgctaatatgcatcacctttctaattatgtttgtaaaggagcgccaaatagagttcaccaacaaagtaaacttcaactggcgtgttgatctgcgaaaggaggagaatgccgccagccttacaaatcattcgatcataattattctcaacaacatactgccatctcatatcgtggatgtgtatctcaattctttggccaaacatgaactctatttcgaaaactatcgaatggtgtctgtcatgtttgccatgctaattaactttgaaatggatcttcgaagcttaagggtgctcaatgagattattgctgagtttgataccttgttgctgttttataaggagtactacaccgttgagaaaatcaaaatcgtcggatgcacctacatggcggcgtgtggacttgatcttaactttgccggctccactaaattcaatgaagaacaaagccgaagaattttgttccagcagagcaatgaggaccttgatgaagtggtctttgtgatgacctcgtatgcgctggacatgatgcgaaccctggccaagagcaatgaggcgtaccagagtattgctggtgatcgcaatattacggatggaacaatcgccatcggcatctccagcggtgaggtgatggccggcattgtgggtgcctcgcagccgcactacgatatatggggcaatccagtcaacatggcctcgcggatggaatccacggggctgccaggacacatccatgtaacggaagagacgtccgaaattctgcaacagttcggcattacctgttcatatcgcggcatgacttttgttaaggggcgcggcaaaataccaacctatttggtgggtatcgatgagaaccttaacttcattccacagaaggcaacgcgatttcccagtcaccaggagcgcagtacggttatatcgttgcagtcaacctatactcatgcggagaataataacagtatagctagcacgtctaggcacactttgcaaagtctataa

SEQ ID NO: 52 - protein, 1117 aa, Drosophila melanogaster
  AAF53229
  GI:7297987
MPRSLGNCQLNYSKERMWEPGYLKAKCAELRLESEFRLYRIRLWKSYLLTFFMLHIFVTSVHCALLLATIERRSIIYFDVALSIGCALVLILVLSVNFCDEFIAKHTWYMYASSIFASLTLVFADLTESIYHTYAHSWILGTFYDTYIIYMIYMFLPIHFISGAVLLALLVSGLYILYFVIFIAQGFAQFASALFSVGGMSVDIVHYLCLNLVGIFYRVMNDTVVRSSFLDRHQYIKEKIWLRNARLQEKQLLDSILPPQISLPLQKDIQGRIVMAKQGIHSWTAMERTMAIQIHPDVSILYADVVNYTHLTTTLTVEMLVKVLHDLYGRFDLAAYRYKVQRIKFLGDCYYCVAGLSDPDPDHANNCVILGLSMINHIMEVRDIHGLDINMRIGVHSGNLFAGVIGEAKLQFDIWGLDVTIANVLESTGVPGCVHISGATLNNLDVNRFDIEDGPEEARDHPLLKKYRIRSYIIRQDLHMDDEDSDEFLGDLHSISLCNMGAQPRISDSANQSLRALFHEELREEFRKMPVSAFSPKRLLGICRFNTGKEVPAHQNLNICLTFTDPILERAYLKQTDYMYKYSIILSASVGCSLVYIELMDTQMICSSCFVLPASVATIQCILALIAWYKKYCWTRYGRNNVPHHYNGFSCFIFRIHDKILNSLPIRICIYLFLMISSFFMSCQREEFEMAYIEERLFHYEQEAHICFHPWVTTNMLSLMICLTFTFAHIPIMVKTAVAILETLAYLLLIFFQFDFVFHHSVTTNPYFKSEYAHALLICITFLIMFVKERQIEFTNKVNFNWRVDLRKEENAASLTNHSIIIILNNILPSHIVDVYLNSLAKHELYFENYRMVSVMFAMLINFEMDLRSLRVLNEIIAEFDTLLLFYKEYYTVEKIKIVGCTYMAACGLDLNFAGSTSTNRKESIPPTEFNEEQSRRILFQQSNEDLDEVVFVMTSYALDMMRTLAKSNEAYQSIAGDRNITDGTIAIGISSGEVMAGIVGASQPHYDIWGNPVNMASRMESTGLPGHIHVTEETSEILQQFGITCSYRGMTFVKGRGKIPTYLVGIDENLNFIPQKATRFPSHQERSTVISLQSTYTHAENNNSIASTSRHTLQSL

SEQ ID NO: 53 - DNA, 5994 bp, Drosophila melanogaster
  Name: EG:52C10.5
  AE003802
  GI: 10727480
  Transcript: CT19856
acacagctgttttgttaaacaaaacagaattattcgccaattgtttacaaaaacactcaaaaagagtctaagcaaacaattggcaagcaagtgaagactggctagtctcagattaaattattccataagtgatggacagccaggcaccgatcgatgatctactgctggacattgtagacaatgcttggcgcatggaagttctacccttcgaccagattctagtgccacgcgaaaagctacccgatccagaggcggacggcggtgattcacacctgacggtcagcgagcaggagcaaaagtggactgatctggcgttgggctcgctggcaccggacgcagccctcatcgatcaactgaacatcacctctatctaaccaaggaccgtgagtccacgggcgagtgccaccgcctcgccaaccaacctattagcaccacaagcccaactcctaacaccccgacaacatgactagcaacaaccaaaacaatagctcaagccaccagcacctacactccccctccaaactaaccgaatttgcccgcaatttcgaagacaagccggaatcgctctttggccgagtggtaaacaagatccagaatgtatacaaccagagctacaataccgtcaacgatatatcaagtgggagcagcagcagttcctccacgcagccagtgcaagtggtgggcaaatcacagttcttcagtgactcccagacttccaccgctgagattgccgatgtggaaacctctagccagagctcagttcgcccccagccacccaccacgctcagcataaggaccaatagtgagacacgtggcacaagcacctccagcaataccgctgcagaggactccgaaaccagcgaccgcgtcgaaacgctgccgctgccaaccagcgaagcgaatcaggggcgcaccgtttctaacgtcctcaaacacataagcaatattgtggccacaaaaaacaataacgatctgcgaaactacaaggacacggagctgcagcgcttttggatgcccgattccaaggctaaggaatgctatgattgctctcaaaagttctccaccttccggaggaaacaccactgtcgattgtgtggccaaatattctgctcaaagtgctgcaaccaagtggtgcctggcatgataattcgctgcgatggcgatctcaaagtgtgcaactactgctccaagatagtgctcacattcctgaagtcctcaagctctgagatgggacaggatatgcaggagctgcagcagcacttaagtaacaaactggaagtacaagatagtggcagctcgcttgcaaaacatccccagatgcaaagggcaccccttccgcgtaagacatcagtgggctatcaagaggagcgattcagttcgcatccaacttacacaaccctttccatcgacgatcgcaagaatatcctgcagcagtcaaattcattaattaccctgcacgaggaaatgcagcgtgatctgcctgctcaaaattgtggtcagcgtctgattgagtttctcaatagtaataataaatcagcaaacgaggtgcaggcggtggccatactgaatgctatgctagccgctggtttcctcgagccaatcgtacccgatcccgagcaaatggacttcgattcgtcgctacactataagttctccaaaagcagcagttcggatacctcccgaacgatgagtccgcaatttgaggcgaatccccatgcggaaccacaacctccaaagtcaatggatcaatcagctgaagaaaaggagaaggagctagaaaatgaactggaaaacgatcgatgctataccacagcaacttctaagcttcttgcctcctattgcgaacacgaagagcagctactggcacagatgttgcgcgcacataatttggaccaggaatgggacaaggtgcttcagatgctttgttccacggcagcgaatcacttcaagccagagcattgtagtaacgatctcatggacatacgtaactatgtaaactttaaaaaggtgccgggtggcagacgcaaggactcgaagattgttcatggagtggcattctctaaaaatgtcgcccataaagatatggcaactcatgtgccctttcctcgcatactgctgctgcagtgtcccattgtgtacgagcgtattgagggaaagtttgtgaccattgagaccgtgctgctccaggaaaaggaataccttcgaaacgtttgcgcccgcattatgagcttcaagcccaacgttgtgcttgtccacaagaatgtggcgggcattgcccaggaccttttgagatcctatgaagttacccttgttctggatgtaaagctttcggtaatggagcgtctgtcacgcaccctgcagtgcgacattgtcagttcaattgagtcgaatataaccatgcccaagctgggctattgcaatgatttttacatacgcaactataatggcaaaacgttgatgttctttgagaagctgaccaatccccggggatacacctgtctcctcagaggtgggagcaatgctgaactgacgagggtcaagcgggtggcatcggccctgctctttgcacgctacaactggcgcttggaaatgtcattcctgctgaacgagttcgcccaaccacttagtccaaaaccttcgatattcgactccaaggaaacaagccccaaaacggaaacggaggcagaacttcgatctaagcgaccaattattttagagcgcaagtccgaggataagatcaccaccatcgtcagcgagaatgtgtctgatttcacggatccattgcgtgcatcacaagccgaagccctgtccacttcgccttgtgctccacccgtggttgaggcgctagctgtggaaccgcgttacgacaacagattccgcacggcactcagttccacgctgctctctgtgagtcccttcctgacatttcccctaccttatttggaaacggaacagggaaggaaatgcaagctgcgtaagctgtttcccgcagagctatacttttccaaacaatggtcccggaccggattggagaggccagatagcatgggagacggcgaagcagggaaatctgagccaggaaacaaagagaaccagatgcagctacttccagcccatgattttgtgctgatgaagatcacagcacctgctagcagtcgagacattcagtcgaagctagctgagttccgctcctttggcggtcggttacccaagggcaaggctccgatgctccgaccgaaaaaaaagaacgccgaagtgatccagcgaccgcagaaggtcagtgaggagcaactgtacaaggatgcccttgatccgcagaaccatcaacgtctaccggtgctcttctgcagcttccattacaatcccaagggcgtttcgtcgttctgcaagctgcccatgctgctggacatgaagttctacgggcaatatgacatcatgctggagcagttcctccaacgttactgctgtctttttaactccatgtgcccgtcgtgcaatctgccgatgctgggtcatgttcgtcgatatgtacactcgttgggttgcgtacatgtctacctaaccgaggacctaacccgttccgaccccacgcgtatatactttacctcctggtgcagcatatgcaatgccactacacccactattccgctttccgatgccgcaaagtgcctttccctcgccaagtaccttgagatgcgcttccatggccacgcctacaagagacgacctccttcgacggacgcagaacaaggtggcactgtatgtgaacactcattgcatcgtgattatgtgcaccacttcagtttccgcggtgttggcgccaaattccaatatacgcccgttgaggtttgggagacggatcttccttcgttgactgtgcaactggatttgccgcaaccatttcaaagtgcccaagtccaggaggaaattaaaaacttttcgataaagggtcacgaggtttacaacaggattcacgagcgtattgctgacctcgccaccgaggaagagaactcaccactggtgcagcatctgaaaaccatgctcacgcatgaccagtttatcttcaagcagaagattgagatcgtacacacactgctcacggataacagggctactgcctacgacactagcgatgctttggccatggcaagaagagctctggcagagagcattgagctgtggggaccgcggttgcaggagatcgagaagctgaccgccaagcaggcgcatcacatcgactctggaaccatctgcacggaggaactaagaccggaacaggttcagactgcagattcttctaaagttaccacctctagtttgccaaaggagaatgatcccctggagtgtccaagcgaggacactgaaactggcgcatcaaacagtcagactgttttggacaagaatttctctattgaccagatgttggcctctaccgttaacgtttactcggataaaaagtctataaggaagattcttacccagcttctgccatctggtaatcaggttaaccctttgcagtcgccatttccggcacaagatcatctgacgcttccattgggcagtattcccattcacgtgagagaaaccgatctcagttcagtgattgcatacagtttgacctcgatggattatcaaaaggcaatagacgaggcggaggccaactccaatgctgcccattcaagtccgcagttaaagcgaaaaattccattagcggaaagcgttagcgacgccgaagacagtccaagcctttcgcgtacttcgagcaacacaagtgccgctcccaatgcatcggttccttctccagctaccgcggcctccgagtcggaggaaaaaagcaaggaacgcataaagcagccaccgagtccgcatatcacactggcattccaagatcacagctgccagttccagtgtaagatctactttgcccgcgagtttgatgcaatgcggtcgaagagtttgaagcctcccaagctagacaaatccctgtaccgccggctggagaagagcaagatgcgggaggagctgagaatctcacagagtcgcaccgggtccgaaatggagctggttcgcaaacccagcgacgttggtgcgcctcgaaccactgaggatgattccaatcaggaggaggacgctaggatagcattggcgcgaagcctttgcaaaagtgtccaatgggaggcgaggggcggtaaatcgggatcccggttttgcaagacgcttgacgatcgtttcgtgctcaaagagatgaactcaagggacatgaccatctttgagccatttgctccgaaatactttgagtacatcgacaggtgccagcagcaacaacagcccacattgctggccaagatctttggtgtcttcagagtcagcgtgaagaaaaaggattctttcgtggagcgttctgtgatggtcatggagaatctgttttacggctgcaatattgaaaacaaatttgatcttaagggctcagagaggaatcgcttggtggatcccagcaatcagcaaggtgaaattgtcttgctggatgagaatctggttcagatgtcctggtcaaagcctttgtatgtgctgtcccatagcaaaactgtcctgagggatgccatccagcgagattcgtccttcctggaaaaaaacctcgtcatggactattcacttttggtgggcttggacaagaaaaatggcgtcttggtacttggcatcatagattacattcgaacctttacgctggataaaagagtggaatccattataaaaggatcgggaatccttggaggcaagggaaaggatccgaccgtggtcaatccggagcgctacaagcagcgctttatcgatgcgatggatcgctatttcctcacagttccggatcgttgggagggcctttccaaggtctaatccccttcacccacccacacacacacacacacacacacacacaaagtgcacacgttagttaacttaacatagctatagacgcaataaagtagacgccaatcc

SEQ ID NO: 54 - protein, 1809 aa, Drosophila melanogaster
  AAF57789
  GI:7302711
MTSNNQNNSSSHQHLHSPSKLTEFARNFEDKPESLFGRVVNKIQNVYNQSYNTVNDISSGSSSSSSTQPVQVVGKSQFFSDSQTSTAEIADVETSSQSSVRPQPPTTLSIRTNSETRGTSTSSNTAAEDSETSDRVETLPLPTSEANQGRTVSNVLKHISNIVATKNNNDLRNYKDTELQRFWMPDSKAKECYDCSQKFSTFRRKHHCRLCGQIFCSKCCNQVVPGMIIRCDGDLKVCNYCSKIVLTFLKSSSSEMGQDMQELQQHLSNKLEVQDSGSSLAKHPQMQRAPLPRKTSVGYQEERFSSHPTYTTLSIDDRKNILQQSNSLITLHEEMQRDLPAQNCGQRLIEFLNSNNKSANEVQAVAILNAMLAAGFLEPIVPDPEQMDFDSSLHYKFSKSSSSDTSRTMSPQFEANPHAEPQPPKSMDQSAEEKEKELENELENDRCYTTATSKLLASYCEHEEQLLAQMLRAHNLDQEWDKVLQMLCSTAANHFKPEHCSNDLMDIRNYVNFKKVPGGRRKDSKIVHGVAFSKNVAHKDMATHVPFPRILLLQCPIVYERIEGKFVTIETVLLQEKEYLRNVCARIMSFKPNVVLVHKNVAGIAQDLLRSYEVTLVLDVKLSVMERLSRTLQCDIVSSIESNITMPKLGYCNDFYIRNYNGKTLMFFEKLTNPRGYTCLLRGGSNAELTRVKRVASALLFARYNWRLEMSFLLNEFAQPLSPKPSIFDSKETSPKTETEAELRSKRPIILERKSEDKITTIVSENVSDFTDPLRASQAEALSTSPCAPPVVEALAVEPRYDNRFRTALSSTLLSVSPFLTFPLPYLETEQGRKCKLRKLFPAELYFSKQWSRTGLERPDSMGDGEAGKSEPGNKENQMQLLPAHDFVLMKITAPASSRDIQSKLAEFRSFGGRLPKGKAPMLRPKKKNAEVIQRPQKVSEEQLYKDALDPQNHQRLPVLFCSFHYNPKGVSSFCKLPMLLDMKFYGQYDIMLEQFLQRYCCLFNSMCPSCNLPMLGHVRRYVHSLGCVHVYLTEDLTRSDPTRIYFTSWCSICNATTPTIPLSDAAKCLSLAKYLEMRFHGHAYKRRPPSTDAEQGGTVCEHSLHRDYVHHFSFRGVGAKFQYTPVEVWETDLPSLTVQLDLPQPFQSAQVQEEIKNFSIKGHEVYNRIHERIADLATEEENSPLVQHLKTMLTHDQFIFKQKIEIVHTLLTDNRATAYDTSDALAMARRALAESIELWGPRLQEIEKLTAKQAHHIDSGTICTEELRPEQVQTADSSKVTTSSLPKENDPLECPSEDTETGASNSQTVLDKNFSIDQMLASTVNVYSDKKSIRKILTQLLPSGNQVNPLQSPFPAQDHLTLPLGSIPIHVRETDLSSVIAYSLTSMDYQKAIDEAEANSNAAHSSPQLKRKIPLAESVSDAEDSPSLSRTSSNTSAAPNASVPSPATAASESEEKSKERIKQPPSPHITLAFQDHSCQFQCKIYFAREFDAMRSKSLKPPKLDKSLYRRLEKSKMREELRISQSRTGSEMELVRKPSDVGAPRTTEDDSNQEEDARIALARSLCKSVQWEARGGKSGSRFCKTLDDRFVLKEMNSRDMTIFEPFAPKYFEYIDRCQQQQQPTLLAKIFGVFRVSVKKKDSFVERSVMVMENLFYGCNIENKFDLKGSERNRLVDPSNQQGEIVLLDENLVQMSWSKPLYVLSHSKTVLRDAIQRDSSFLEKNLVMDYSLLVGLDKKNGVLVLGIIDYIRTFTLDKRVESIIKGSGILGGKGKDPTVVNPERYKQRFIDAMDRYFLTVPDRWEGLSKV

SEQ ID NO: 55 - DNA, 1577 bp, Drosophila melanogaster
  Name: gatA
  AE003724
  GI: 10726610
  Transcript: CT18575
cgaaaattgggtgaataagttaaaatccagctgctttcaaactgaaaagaatgcggcgtcacttacagtggagcattaagcagctaacagcgagttactcagatggtcagctgtctcctcgccgggtgaccgaagatgctctgcaagatgccctgcggtggaagacactgaatgcctttgtgcgcctcacgccggaacaggcggggcagcaggcccaggacgcggagcagcgctataagctaaggcaaccgattagtgatcttgatggagtcaccattgccatcaaggacaacttttgcaccaaagatgtacacaccacctgtgcctcacggatgctgcaagactttgtgcctccctatgatgccactgtgtgctccagacttaaacaagccggcgctgtaattctgggcaagacgaatatggatcagtttgccatgggcgccggcactgtggactccctgtacgggccgactaagaacatctggagcgaggaccttaacaaggatcactggcgcatcgcgggcggcagttctggaggctctgcatccgccgtagccgcgggtctttgttatgcagcaattggttcggacacgggtggctccacccgaaacccggcttcgtactgcggcgtggtgggtctaaagcccacctacggcctcgtctcccgccacggtcttattccgctggtcaattccatggacgtgcccggcatttttgcccgctccgtcagcgattgcgtggcggtactgaatacagtggcagggccggataaactggactccacaaccatcaggcagccttttaccaggttacatctgccggaagttgggcaaattgacctgagcactgtgcgcataggaataccaaaggaataccattgccacggtctttccgccgaagttctggaaacgtggtctaaggtggccgatttgctggagtgtagcggtgcctccgtcagacaggtttccctgcccaatacggcagcaagtatattcgtgtacaccattcttaatcagtgcgaggtggccagcaacatggcaaggtacgatggaatcgagtacggccatcgggcaacagacgagcgcagcacggagcaattgtatgccctatccagggccgagggattcaacgatgtggttaagacacgcatactcactggaaactttctgctgctgaaaaagaactatgatcactactttgagaaggctttgcgggtgcgccgccttattgcagaggactttgcaagggtgtttgattcctcggccaaagaggagcgcgtggacatccttctcacgccgacaactcttacagaggctccgctgtacaaggacttcgcctccctgaccaacagggatcagtgtgccgtgcaggacttttgcactcagccagccaacatggctggaattcccgccgtgtctataccgattcgcctgtcccaggccggattgcccttgagccttcagctgatgagcaacagcctcaacgagcagttactgctcacagtggcacgatggatagaggcgcaggtggaattcgacagcctagagcactcgcaacagtataaggccagtttgtaa

SEQ ID NO: 56 - protein, 508 aa, Drosophila melanogaster
  AAF55624
  GI:7300468
MRRHLQWSIKQLTASYSDGQLSPRRVTEDALQDALRWKTLNAFVRLTPEQAGQQAQDAEQRYKLRQPISDLDGVTIAIKDNFCTKDVHTTCASRMLQDFVPPYDATVCSRLKQAGAVILGKTNMDQFAMGAGTVDSLYGPTKNIWSEDLNKDHWRIAGGSSGGSASAVAAGLCYAAIGSDTGGSTRNPASYCGVVGLKPTYGLVSRHGLIPLVNSMDVPGIFARSVSDCVAVLNTVAGPDKLDSTTIRQPFTRLHLPEVGQIDLSTVRIGIPKEYHCHGLSAEVLETWSKVADLLECSGASVRQVSLPNTAASIFVYTILNQCEVASNMARYDGIEYGHRATDERSTEQLYALSRAEGFNDVVKTRILTGNFLLLKKNYDHYFEKALRVRRLIAEDFARVFDSSAKEERVDILLTPTTLTEAPLYKDFASLTNRDQCAVQDFCTQPANMAGIPAVSIPIRLSQAGLPLSLQLMSNSLNEQLLLTVARWIEAQVEFDSLEHSQQYKASL

SEQ ID NO: 57 - DNA, 3645 bp, Drosophila melanogaster
  Name: CG17149
  AE003514
  GI: 10727803
  Transcript: CT33310
ccagaacggtataaacaatttttatattttgcacttttaaatgtcggaaaatcaatctgtgagccaacctaatatgaaaagcgacgcatggatcagctgatacagcatttgataataatacttcattgtcatcagagaagcagggagtttagaccaaaaaaaaaaactacacccgcagtccgatcctcaaaacgtgtgataataaaatcacggaacaatcagaaaaatatcgaaagaataatgcggcaatattccggtttggtggactaaagaattcgtgattttcgaacgtgagctagctttattggaattggaaatgagttcgagaaaaatttaaacgggttccacttttgaagggccaacttttcagtgtcccggtggcagttccataatccggagatgaaacccacccagttcggaggcagtagctccaagatgaccgagccaattgagtatgtgacgctaattagcgacgattccgatggtgagcccacgcccaaaagaaacgtcaatcacccgccgtcggcattgtcagcacccaatcctggtcagaaacaaaagcacccggatgaggactcaaatgacgcacctgccaccagcgatgagcgacgcacaagtaggcgcaatcggccaaaagtggattatagtaacaggcctagtggaagtggagacaccgcctccaatgacaagtcaggatcggcatccatgggacctaacaaccagcaagcagagcgtcgcagccaaagccaaacccgcaagtcagaagccaatgctacctcctcctccgtgtccggacccagtgccggaaattccagaccgtcccagaacggagattccaaggaccgggatgccggcacgcccacggttttgtctggccaagagggcgccgtcttccaatctcgcctgccatttaacaaaatgacacccaacgaagaggcctgctttccggacatcagtcgctcgggcattctcggccatcgggtattcctcaacattcgtaacagcctcttgcacatgtgggtggacaatcccaagatccagctgagcttcgagatcgccctgaagaacctgccgccgccattcgacagcgagcccagtttggtaaggcgagtacactcgtttctggagcgtcatggcttcattaacttcggcatctttaagcgacttaagcctatacccgccaaaaagctgggcaaagtcatagtgattggggcagggatctccggcttagcagtggcacaccagttgcagcagttcggcatggatgtgatcgtcttggaagcgcgggatcgggtagggggacggatatctacgtttcggaagaacagctatattgccgatgtgggagcaatggtggttaccggcgtctatggcaatccaatgacgatcctcagcaagcagatcggtatggacctagttcccatccagcagacatgtccactttacggcccagatggaaagcccgtgcccaaggagaaggatgacgtgatcgagagagaatttaaccgactgctggaatcagccagctacctgtcccaccgccttgattttaactacgccggcgattgcccagtttcgctgggcgatgccttggagtggataatcagtatgcaggagatgcaggtgatgcacaaacgggggcagcacatgcaggagatcatagccacccaaacgaagatcattgaacagcgtcgtcgactgaaaacccttagagataccatcggcaaactaaagaatgagcacttggcaatgatcaaccagcggaaacccaaaggcacggatggcgatctgaaatactgttaccaagagtttaacattcggaacacccagatcaaaatggaggaaacgatcagtacgtttcacgatctccatgccgaggaaaagcagatgttagccaaactccacgaactggagcagaaccgacctagcgatgtgtacctctcgtcccgcgaccgcctgatcttggactggcattttgccaacttggaatttgctaatgccacccgactaaataacctgtcgttgaagcactgggatcaggacgatgacttcgagtttattggccaccacacaactgtgcggaacggttattcatgtgtgcctgtagctcttactgaaaacctggacatccgtgtcaatagcgccgtcaaggagataaagtacggcaccaaaggtgtggaagtagtggctgaaaacttgaagacatccaattcgcagatgacatacaaggcagaccttgtcgtctgcacacttactctgggcgtcctcaaagtggcggtagcacataaggagtcacagcagagtaacacagtcaagttcgacccgccattgccggactggaaacagcaggccatcaaaaggctgggatttgggaatctcaataaggttgtgctctgcttcgatcgcattttttgggatcccaacgctaatctcttcggacacgtgggcagcacgacggcgagtagaggagaaatgtttctgttctggagtataagctcatctccggtgttgctcgctctagtcgccggaatggcagcgaatctggtggagagcgtgacggatgacatcataatcgggcgttgtatgtcggtgctaaaaaacatcttcgggaatacctctgttccacaacccaaggaaacagtggtaacgcgttggcgcagcgatccctgggcccgtgggtcgtacagctacgtatccgttggttcctcgggcagtgactacgatctgctggcggcgccggtcattccgccgtccagtaaggatgcggaaggattgccacggctattcttcgcgggtgagcatacgatacggaattatccggccactgtgcatggagcgtacttgagcggattgcgcgaggcgggacgtattgcggattactatctcggctatccagagggaacaccgccggacattggctactcggtggctgaggcggccaatctggtgtccgtgggaaatgttgtcaagctgcgcgacctctcgcccaatctatctgactcctccccgtcgtcaaagaagtcggaggagaattcaaactcaaacactgccgactctacggagctacagtaacaatgtatttagcgtgatggatttggtccccagcagttactcctagagcgtttagttttgtatcatacaactggggctcgctgtttaaaacgaagctaggccgctgtaaatacctaagactattcaactaagcatagaccactttcattcaaccaattataaattaagataaaaagcaataacacccaacaaagcaaatcctcttcagtgtttccttcagatcaaagtaaaccaacctctgtgcgcctataattgatcaacaaatgcaatcatctatcataactttccgtaccacttacccgccaatgaggagtatatcttttaagtatattatcgcctataagattgttttcaataagtattttgtaaattaaatttgaaaatagtaaattaaattgacgccgatatttttaattaggttaatttaatttaagtacaaatttcatattacttccaacttaaaaacactttcaatttttttaatatcttattgttatcttgataaaatacgatgtagaaaaatgtgtacgcaaatcatggcataaattgagttttaaaatataatgtaagctt

SEQ ID NO: 58 - protein, 890 aa, Drosophila melanogaster
  AAF49052
  GI:7293682
MKPTQFGGSSSKMTEPIEYVTLISDDSDGEPTPKRNVNHPPSALSAPNPGQKQKHPDEDSNDAPATSDERRTSRRNRPKVDYSNRPSGSGDTASNDKSGSASMGPNNQQAERRSQSQTRKSEANATSSSVSGPSAGNSRPSQNGDSKDRDAGTPTVLSGQEGAVFQSRLPFNKMTPNEEACFPDISRSGILGHRVFLNIRNSLLHMWVDNPKIQLSFEIALKNLPPPFDSEPSLVRRVHSFLERHGFINFGIFKRLKPIPAKKLGKVIVIGAGISGLAVAHQLQQFGMDVIVLEARDRVGGRISTFRKNSYIADVGAMVVTGVYGNPMTILSKQIGMDLVPIQQTCPLYGPDGKPVPKEKDDVIEREFNRLLESASYLSHRLDFNYAGDCPVSLGDALEWIISMQEMQVMHKRGQHMQEIIATQTKIIEQRRRLKTLRDTIGKLKNEHLAMINQRKPKGTDGDLKYCYQEFNIRNTQIKMEETISTFHDLHAEEKQMLAKLHELEQNRPSDVYLSSRDRLILDWHFANLEFANATRLNNLSLKHWDQDDDFEFIGHHTTVRNGYSCVPVALTENLDIRVNSAVKEIKYGTKGVEVVAENLKTSNSQMTYKADLVVCTLTLGVLKVAVAHKESQQSNTVKFDPPLPDWKQQAIKRLGFGNLNKVVLCFDRIFWDPNANLFGHVGSTTASRGEMFLFWSISSSPVLLALVAGMAANLVESVTDDIIIGRCMSVLKNIFGNTSVPQPKETVVTRWRSDPWARGSYSYVSVGSSGSDYDLLAAPVIPPSSKDAEGLPRLFFAGEHTIRNYPATVHGAYLSGLREAGRIADYYLGYPEGTPPDIGYSVAEAANLVSVGNVVKLRDLSPNLSDSSPSSKKSEENSNSNTADSTELQ

SEQ ID NO: 59 - DNA, 3559 bp, Drosophila melanogaster
  Name: CG17149
  AE003514
  GI: 10727803
  Transcript: CT38086
tttatattttgcacttttaaatgtcggaaaatcaatctgtgagccaacctaatatgaaaagcgacgcatggatcagctgatacagcatttgataataatacttcattgtcatcagagaagcagggagtttagaccaaaaaaaaaaactacacccgcagtccgatcctcaaaacgtgtgataataaaatcacggaacaatcagaaaaatatcgaaagaataatgcggcaatattccggtttggtggactaaagaattcgtgattttcgaacggccaacttttcagtgtcccggtggcagttccataatccggagatgaaacccacccagttcggaggcagtagctccaagatgaccgagccaattgagtatgtgacgctaattagcgacgattccgatggtgagcccacgcccaaaagaaacgtcaatcacccgccgtcggcattgtcagcacccaatcctggtcagaaacaaaagcacccggatgaggactcaaatgacgcacctgccaccagcgatgagcgacgcacaagtaggcgcaatcggccaaaagtggattatagtaacaggcctagtggaagtggagacaccgcctccaatgacaagtcaggatcggcatccatgggacctaacaaccagcaagcagagcgtcgcagccaaagccaaacccgcaagtcagaagccaatgctacctcctcctccgtgtccggacccagtgccggaaattccagaccgtcccagaacggagattccaaggaccgggatgccggcacgcccacggttttgtctggccaagagggcgccgtcttccaatctcgcctgccatttaacaaaatgacacccaacgaagaggcctgctttccggacatcagtcgctcgggcattctcggccatcgggtattcctcaacattcgtaacagcctcttgcacatgtgggtggacaatcccaagatccagctgagcttcgagatcgccctgaagaacctgccgccgccattcgacagcgagcccagtttggtaaggcgagtacactcgtttctggagcgtcatggcttcattaacttcggcatctttaagcgacttaagcctatacccgccaaaaagctgggcaaagtcatagtgattggggcagggatctccggcttagcagtggcacaccagttgcagcagttcggcatggatgtgatcgtcttggaagcgcgggatcgggtagggggacggatatctacgtttcggaagaacagctatattgccgatgtgggagcaatggtggttaccggcgtctatggcaatccaatgacgatcctcagcaagcagatcggtatggacctagttcccatccagcagacatgtccactttacggcccagatggaaagcccgtgcccaaggagaaggatgacgtgatcgagagagaatttaaccgactgctggaatcagccagctacctgtcccaccgccttgattttaactacgccggcgattgcccagtttcgctgggcgatgccttggagtggataatcagtatgcaggagatgcaggtgatgcacaaacgggggcagcacatgcaggagatcatagccacccaaacgaagatcattgaacagcgtcgtcgactgaaaacccttagagataccatcggcaaactaaagaatgagcacttggcaatgatcaaccagcggaaacccaaaggcacggatggcgatctgaaatactgttaccaagagtttaacattcggaacacccagatcaaaatggaggaaacgatcagtacgtttcacgatctccatgccgaggaaaagcagatgttagccaaactccacgaactggagcagaaccgacctagcgatgtgtacctctcgtcccgcgaccgcctgatcttggactggcattttgccaacttggaatttgctaatgccacccgactaaataacctgtcgttgaagcactgggatcaggacgatgacttcgagtttattggccaccacacaactgtgcggaacggttattcatgtgtgcctgtagctcttactgaaaacctggacatccgtgtcaatagcgccgtcaaggagataaagtacggcaccaaaggtgtggaagtagtggctgaaaacttgaagacatccaattcgcagatgacatacaaggcagaccttgtcgtctgcacacttactctgggcgtcctcaaagtggcggtagcacataaggagtcacagcagagtaacacagtcaagttcgacccgccattgccggactggaaacagcaggccatcaaaaggctgggatttgggaatctcaataaggttgtgctctgcttcgatcgcattttttgggatcccaacgctaatctcttcggacacgtgggcagcacgacggcgagtagaggagaaatgtttctgttctggagtataagctcatctccggtgttgctcgctctagtcgccggaatggcagcgaatctggtggagagcgtgacggatgacatcataatcgggcgttgtatgtcggtgctaaaaaacatcttcgggaatacctctgttccacaacccaaggaaacagtggtaacgcgttggcgcagcgatccctgggcccgtgggtcgtacagctacgtatccgttggttcctcgggcagtgactacgatctgctggcggcgccggtcattccgccgtccagtaaggatgcggaaggattgccacggctattcttcgcgggtgagcatacgatacggaattatccggccactgtgcatggagcgtacttgagcggattgcgcgaggcgggacgtattgcggattactatctcggctatccagagggaacaccgccggacattggctactcggtggctgaggcggccaatctggtgtccgtgggaaatgttgtcaagctgcgcgacctctcgcccaatctatctgactcctccccgtcgtcaaagaagtcggaggagaattcaaactcaaacactgccgactctacggagctacagtaacaatgtatttagcgtgatggatttggtccccagcagttactcctagagcgtttagttttgtatcatacaactggggctcgctgtttaaaacgaagctaggccgctgtaaatacctaagactattcaactaagcatagaccactttcattcaaccaattataaattaagataaaaagcaataacacccaacaaagcaaatcctcttcagtgtttccttcagatcaaagtaaaccaacctctgtgcgcctataattgatcaacaaatgcaatcatctatcataactttccgtaccacttacccgccaatgaggagtatatcttttaagtatattatcgcctataagattgttttcaataagtattttgtaaattaaatttgaaaatagtaaattaaattgacgccgatatttttaattaggttaatttaatttaagtacaaatttcatattacttccaacttaaaaacactttcaatttttttaatatcttattgttatcttgataaaatacgatgtagaaaaatgtgtacgcaaatcatggcataaattgagttttaaaatataatgtaagctt

SEQ ID NO: 60 - protein, 890 aa, Drosophila melanogaster; identical to SEQ ID NO: 58
  AAF49051
  GI:7293681

SEQ ID NO: 61 - DNA, 10308 bp, Drosophila melanogaster
  Name: CG2905
  AE003787
  GI: 10728163
  Transcript: CT9844
atgctcaaccttatgaaaaattgtcccaaggaagccgctcatctcagaaaagaacttttaattgctgcccgtcatatatttgctacagatttacgtcaaaaatttattccatcaatcgaacaattgtttgatgaggatttgcttattggaaaaggagttacattggattctattcggccattggcgtattcaactttagctgacctagctcaccacgttcgccaaagcctaaatatagacgttttaataaaggcagtgaatctcttttcaaaaaatgttcatgatgaatcacttgctgtgggaatacaaactatgtcatgcaagcttttgttaaatctagttgattgtttacgtcatcacagtgaaacagaaccacaaagatcaaaagctctactctcaaaactgttaaaagtgtttgtaaaaaaatttgaaactatagctaaaattcagcttccattaataattcaaaagtgcaaagggcacgcattttctggagcattggtaaattcatctggcaacgcttccttatcacacattaacgcgccagatctaaaagacgacatatccaacatccaagtatctgcatctggatcacaatggatatattccgtcaatgtcgctgaatttcgaagcttagtaaaaacccttgttggtggagtaaaaacaataacttggggtttttttaactcaaagtttcagctaactgataccaaactggccaaccatgaaaaaatttttggacctgaaatcgtatgttcttacatcgacttggtttactatgcgatggaggctctagatatatacactataaacgttaatccaaatcaacagagaacgtctgggttgatttccagaagtaaagaagaaaaagaagtcttggagcattttagtggcatatttttaatgatgcactcccaaaactttcaagaaatattttctactacgattaattttttggtggaaaggatctacaaaaatcagtccttacaagtgatagcgaactcctttttagcaaatcctactacttcacctctgtttgccactgttctagtggaatatcttttgaacaaaatggaagaaatgggatcaaacttggaacgctccaacttgtatctacgattattcaagttggtattcggcagcgtaagtctttttccagtcgaaaatgaacagatgttgcgtccacatcttcataaaatagtcaatagatccatggaattggctttgatatcggaggagccgtataactattttttacttctgagggcattgtttagatcgattggaggaggaagccatgacctattataccaagagtttctgccacttttaccaaacttattagaaggattaaatcgcctacagagtggatttcataagcagcacatgcgagatcttttcgtggaactttgccttacagttccggtccgcttgtcatctttactgccctatttaccaatgttgatggacccattagtttctgcgttaaacggatctccaacattaataagtcagggcctgcgaaccttagagctttgcgttgacaatttgcagccagactttttatatgatcatatacaaccagtaagagctgctttaatgcaagcattgtggaaaactttaagaaatcaggataacgccgctttggttgcctttcgcgttctaggaaaatttggtggcggcaatcgaaaaatgatggtggagccacaagctttgtcgtatattataaacgacaagcccaccatttccattgtaacttattttcaggaatacgaaacaccaatagattttcctgttgatgaagcgattaagtccgcctttagagcattgggatcaaattctactgaccagttttataggaggcaaagctgggaagtaatcaggtgcttcttagctgcttttattagtttggatgatgaaaaacatatgctgctgaaactttttacacatgtagattttgttgaaaataaaattatgaattggtctacgtttcaacataaagccgggaacgaaactgtacgagaaactcatcagacagccctcataggtatgttggttgcatcagcaacaaaggacttgcgtgattcagtgtgcccagtaatggccgctgttgtgaggcattatactatggtagctattgcacagcaggccggaccttttccacaaaaaggctaccaagccactcatggaattgaccccatgatattaatagatgctttagcctcttgcatgggtcatgaagaaaaggagttatgcaaacccggaatagcttgtatgggtattatacttgacactgcaacaaatattatgggtaataaagacagagcgtgtaaattgcccataatacagtatctagcagaaaaaatggtatccttatgctatgatcggccatggtactcaaaagtaggcggttgccaagcaattcaatttttatgcaaacatatgtctttgcgagccctttttcaaaatctctttaattttttaaaagctttcatgtttgtattaatggacctagagggagacgtttctaatggggctattgaaataacaaaaagttatatgaaaagcatgttggaaatttgtttaacgccaataaatgaatgttataagaatatagatctaaaggacttacaagccaaagccacttatgaagttattcacgaattagtgcggcacatcacaagccctaataccattgttagagaagaatctatggtactacttaaacatattggtacaatacaatccaaaaccgtttctgaagttatggatcctcataaagacgttctcgctgacattataccgccaaagaagcatttattgagacatcaacccgcaaatgcgcaaatcggacttatggatggcaatacattctgcacaactttggagccaagactttttacaattgatttgacgaatacctaccacaaattattttttcacgagttacttacactaagtgaagccgaagatgccactttagcaaagttggactgttacaaaaacgttccgaatcttataccacttaggactagtgcgttgcgagctttagcagcatgccactatataagtgatatcggatacaaagaaaaaataataaatataatttttaaagtaatggaaagtgataaatcagaacttcagacaactgcgtttcattgcatgaagcattttataactggagttactctggaaaaagaaaaggtacaatctgcaatgcgcccactgctattaaaattgggcgaccacagaaatttatcgataccagcaataaaacgcttatcttactttactcagatctttcctcaaatgttcaatgagaagttaagtgagcaaattttgcaacattgctctaaaattatggaaatatttgttagtgaatacaaatccacaagtccaaacgttaatttttttgcatcatcgaaaggtggagaatatgaacagaaaattgtcatactaatcgaaatgtttttctatatatcagcatcagtaaaatacattgaaaagctgtgccaacttgttttaaaaacggaaaaaaacttaatgattgaggcatcgagtccatatcgagaagccctaattaagtttcttcaacgatttccaacagaaactgtggatttatttttaacggaatctcttatgatagatccgcaatggaatcgtctttttatatacttgttgaaacacgaaacgggagtatcatttcgagcagttattaaaagtagtcggtataataatttaatacattatttaaatacacacacagaatttccagaagcactcaaatatgaaattcagcaccaagccgttttaataatttttacattaatggaatcagacgatcaatggataccaacacgacaagatattgttgacgcccttaaaaattgttggcagaattatttaagtacattaagctctgaagacgttctgtgtgacttatggcatttgattggaaaaatacttttgcattatttttctaacaatacaaatgacattgaactgctgtttcaattattacgtgctttatgcttccgatttataccggatgtctatttcctgcgggacttcttgcaacacacagtagcacaaagttttacggttaactggaaacgaaacgcattcttttactttgttgaaaactttaataacagctttctttcagaagagctaaaggcaaaaataataacagcagtcataataccctgttttgctgtaagtttcgataaaggtgaaggaaataaactaattggggctcctccgaccccgtatcaagaagatgaaaaaaatattgtgtccgtttttattaataaagtgtttgacccagataaacagtatgatgatgcagtaagaattgctctattacaactagcatgcttattggtagaacgtgcatctcagcacatacatgacggagatgctaataataagcgccaaggcaataagcttagacgactcatgacctttgcctggccctgtttgctgagtaaaagttcagtggatcctactgcacgataccacggtcacttattactttcgcatataatcgcaagattggccattcacaagaaaatagttttacaagtatttcattccttgttgaaaggacacgcattagaggccagatctattgttaaacaggcacttgatgttctaacgccagctatgccgttgcgaatggaggatggaaatactatgctaacacactggacaaaaaaaattatagttgaagaaggtcacgctatgcagcagttatttcatattttgcagctcattattcgtcattataaagtgtattttccggttcgacatcaactagtgcaacacttgattaactatatgcagcgccttgggtttcctcctactgcatctattgaacataaaaaacttgctgtggacttagcagaagttattataaaatgggaacttcatcgtattaaggatgatcgtgaaactaaaacagatggaaccgaagaggagttaatacaggaaagctcagtaaaacgatcagggatcgatttagtagaaactcgaaaaaagtcattcgatattataagagaaacaacagtccaaggaaagtgcgttatgctattaaaaatggcgatgcgtcccgagatctggcctcaaccatttgatattaagcttaattggcttgataaagttcttgctacagtggaaacccctcatcacaacttaaacaacatatgtactggaatagattttttaacatttttaactactatactaagtccagatcagttggtgtcaattatacgaccggttcaacgaggcctgtccttgtgtataattcatcaaaatacacgaattgtgcggttaatgcatatgtttttgacgcgaataatggcaatttttccacctgacacccaacacaagcatgaagatcttgatttgttatataccgctgttagtaaaatgatcgctgaaaacctaacaagttacgaaaagagtccacaaccgaatgcttcttcgctttttggtaccttaatgattttgaaagcgtgcactactaataatgcaagttatattgatcgaattttagtccagtttataagggttctgaatcatcttacaagggatcatattaacaccattggtggtaacactgttattagccaatctcctgattcaaatgctttacctttagaactcttagttctctctttggaattaatcaagaataggatctttgtaatgagtgtggaaatcagaaaacttttcataggcaccattttggttagtcttatagaaaagagcacggaggtaaaaattataaaatgtataattaaaatgctggatgaatggattaaaacgaaagagccaaatgttatgacacaagttccttctattcgcgaaaagtcggccttgctggtaaagttaatgcaaaacgttgaaaagaaatttactgatgaaatagagcttaatatacaattcttggaaatcataaattttatatatagagatgaaattcttaaacaaactgagttaacaaacaaactagagggagcttttttaaacggattacgttttcaaaatccaaacgtacgctcgaaattttttgagattttagactcatcaatgcggcgtagacttcacgatcgattgttatatataatttgttcccaagcttgggacacaattggttcccattattggataaaacaatgcattgaattgcttattttaacagccaatacaatgatgcaaattcaatgttcaaatgaacaatttaaaatacccagcattacttcagtcattccagtgaattcatcagaaacacaggaaaattcctttgtatccttcttatcctctcattccgaatcttttgacattatacaaactgttgatgataaagacgacgtgtatgatatcgatttaaatgctgatcgcaaagaagattgtcaacaaatactaccaaatcgacgtgttactcttgttgaactagtttacaagcaagctgaatttttagaagcaaaccgaaatattaggaccgaccagatgcttgtcgccacatctcagctatgtcatattgatacacagttagctcaaagcgtatggttatctatgtttccacgtatttggagtatattcactgaagatcaaaggtgtaatatcacaaaagaactgattccctttttatcgtctggaactaacgttaatcaaaaagactgccatccaagtacattaaatacttttgtagagagtttaactaaatgtgcgccacccatatatattccacctaatttattagcatacctaggcaaatctcataacctatggcatagagctatacttgttttagaagatatggccgttaatcaatcaatgcaatccaaggatattgatggcggtgaaaatcaattctctgacttggatgtacaacaatcaaataatatatttgattcactttcaaaaatgtattcttcgatgcatgaggaagatctttgggctggcctatggcttaaatttgcacactacccggaaacaaatatagctgtttcgtatgagcaaatgggatttttcgaagaagcccaaggtgcctatgatctagcaatgaccaaatttaaacaagatctaagtaatggtgtagttaatacatatgttaatagtgaattattattgtgggaaaatcactggatgcgatgtgctaaagaattgaaccaatgggacattttactggactatgcccaaactaataaggacaaaaatatgtttttgattctggaaagttcgtggcgcgtacctgattggaatttgatgaaaatcgcactggctaaaacagaacaatgctatttaaaacactacggctttaaaatcaacctttacaaagggtatttgagtattctccaccaagaagaaaggcaaacaggcaatatcgaacgatatgttgaaattgcatccagcttatgcattcgtgaatggcgtcgattgccgaacatagtttcacatattcatttgccatatcttcaagcatcacaacaaattatggagcttcatgaagcaagtcaaatccatcagggacttgctcaatcgcgcaacaattcacttcacgatatgaaagctatcgtgaaaacttggcgtaatcgtttacctattatttctgatgacttatcgcattggagtgacatatttacatggagacaacatcactaccaaataataacacaacacctagaacaacaatcggatcaaggaagtacaatgctaggagttcacgcatcagcacaagctataatttcttttggaaaaatagctcggaaacacaatttgactggtgtttgtcaggagacgttgtccaggatatatacaattccgtctgttcctatcgtggattgttttcagaaaattcggcagcaagtaaaatgctacctgcaaatgccctcaacatctggaaaaaatgaaattaatgaagccttggaagtaattgagtccacgaatttaaaatacttcactggtgaaatgaatgctgaattttacgctctaaaggggctattattagcacaaattggaagatcagaagaggctggaaaatcatttagtgttgctgctcagcttcatgatggtcttaccaaagcctgggcaatgtggggtgactatatggaacaaatatttttaaaagaaaggaaaatcacattagccgtcgatgctttaatttgttatttacaagcaagcagaaatcaaattgaaagcaaaacccgaaaatatattgcaaaagttttgtggtttctgtcttatgataataatactaaaatcctcataagcactttagaaaagcatgtggcaggcattccaccctcttattggctaccatggattcctcagttgctctgttgcttagaacagttcgaaggggatgttatattaaatctcttaagccaaattggacgcctttatcctcaagcggtatatttcccgattcggactttatatttgactttaaaaatcgaacaacgcgaaaaacataaaactgctgaacaggctgtaaaaagttcatgctcgaacatcgatggaactactttaagctttggaaggggagcaagtcacggaaacattccatcaataaatcccattaaagcaactccgcccatgtggcgctgctctaaggtgatgcaattacagagagaagtacatccaacaatattaagttcattggaaggaattgtagaccaaatggtttggtttagagaaagctggacagaggaagttcttcgacaactacgccaaggcctaattaaatgctatgccatagcctttgaaaaaagggatactgttcaacattctaccataacacctcacacgttgcattttgtcaaaaagctgggttctacgtttggcattggaatagaaaatgttccgggatcagtaacctcctcaatttctaattcagcagcctcggagtctcttgctcgacgcgcccaagttacttttcaagatccagtatttcaaaaaatgaaggagcaattcactaatgacttcgatttttcaaaacctggtgccatgaaattgcacaacttgatatcaaaattaaaaacatggataaaagtcctggagactaaagttaaaaaattacccacgtcctttttgatagaagacaagtgtaggtttttatcaaactttagtcagaagacagctgaggttgaacttcctggagaattgttaattcccttatcatctcattattatgtaagaatcgcaagattcatgccgcgtgtggaaattgtacaaaaaaataacacagcagcgcgtaggttatatataagaggtactaacgggaaaatctatccgtaccttgtagttcttgattcaggtttgggagatgctcgccgagaggaaagagttttgcagttaaaacgcatgttgaattactatttagaaaaacaaaaagagacaagtcgaagatttcttaacataacggtaccaagggttgtcccgatatcgccccaaatgagattggcagaagataacccaaacagtatttcattgttaaaaatatttaaaaaatgctgtcaaagtatgcaggttgactacgacatgccaatagttaagtattatgaccgtctttctgaagtacaggcaagaggcactccaactacacataccctattgagagaaatattctctgaaattcaatggactatggtcccaaaaacattactaaagcattgggctttgaaaacattcttggcggctactgacttttggcatttccgaaaaatgcttaccctgcagttggctttggcatttttatgcgaacacgctttgaatcttactcgactgaatgcggatatgatgtaccttcatcaagactcaggacttatgaacatatcttattttaagtttgatgtaaatgatgataagtgccagcttaatcaacaccgacctgtaccatttcgcctgactccgaatgttggtgaattcataacacattttggaataactggacctttatctgcagcaattgtggcaacggctcggtgttttattcaaccaaattacaaattaagctcaatattacaaaccattttaagagatgaaataatagccctgcaaaaaaaaggattcagagaatgtaaactaatcgaaggctctgaagaccgttattccgatggaaattgtatggagcactcagtaaacattgtgaattcagcggtggatatcataatgacgcgttttaataaaatatcttattttgatagcattgaaaataagaagatttccgtgctcgttcaatcggcaactaacattgataatctttgtcgtatggatcctgcttggcatccctggctataa

SEQ ID NO: 62 - protein, 3435 aa, Drosophila melanogaster
  AAF57342
  GI:7302249
MLNLMKNCPKEAAHLRKELLIAARHIFATDLRQKFIPSIEQLFDEDLLIGKGVTLDSIRPLAYSTLADLAHHVRQSLNIDVLIKAVNLFSKNVHDESLAVGIQTMSCKLLLNLVDCLRHHSETEPQRSKALLSKLLKVFVKKFETIAKIQLPLIIQKCKGHAFSGALVNSSGNASLSHINAPDLKDDISNIQVSASGSQWIYSVNVAEFRSLVKTLVGGVKTITWGFFNSKFQLTDTKLANHEKIFGPEIVCSYIDLVYYAMEALDIYTINVNPNQQRTSGLISRSKEEKEVLEHFSGIFLMMHSQNFQEIFSTTINFLVERIYKNQSLQVIANSFLANPTTSPLFATVLVEYLLNKMEEMGSNLERSNLYLRLFKLVFGSVSLFPVENEQMLRPHLHKIVNRSMELALISEEPYNYFLLLRALFRSIGGGSHDLLYQEFLPLLPNLLEGLNRLQSGFHKQHMRDLFVELCLTVPVRLSSLLPYLPMLMDPLVSALNGSPTLISQGLRTLELCVDNLQPDFLYDHIQPVRAALMQALWKTLRNQDNAALVAFRVLGKFGGGNRKMMVEPQALSYIINDKPTISIVTYFQEYETPIDFPVDEAIKSAFRALGSNSTDQFYRRQSWEVIRCFLAAFISLDDEKHMLLKLFTHVDFVENKIMNWSTFQHKAGNETVRETHQTALIGMLVASATKDLRDSVCPVMAAVVRHYTMVAIAQQAGPFPQKGYQATHGIDPMILIDALASCMGHEEKELCKPGIACMGIILDTATNIMGNKDRACKLPIIQYLAEKMVSLCYDRPWYSKVGGCQAIQFLCKHMSLRALFQNLFNFLKAFMFVLMDLEGDVSNGAIEITKSYMKSMLEICLTPINECYKNIDLKDLQAKATYEVIHELVRHITSPNTIVREESMVLLKHIGTIQSKTVSEVMDPHKDVLADIIPPKKHLLRHQPANAQIGLMDGNTFCTTLEPRLFTIDLTNTYHKLFFHELLTLSEAEDATLAKLDCYKNVPNLIPLRTSALRALAACHYISDIGYKEKIINIIFKVMESDKSELQTTAFHCMKHFITGVTLEKEKVQSAMRPLLLKLGDHRNLSIPAIKRLSYFTQIFPQMFNEKLSEQILQHCSKIMEIFVSEYKSTSPNVNFFASSKGGEYEQKIVILIEMFFYISASVKYIEKLCQLVLKTEKNLMIEASSPYREALIKFLQRFPTETVDLFLTESLMIDPQWNRLFIYLLKHETGVSFRAVIKSSRYNNLIHYLNTHTEFPEALKYEIQHQAVLIIFTLMESDDQWIPTRQDIVDALKNCWQNYLSTLSSEDVLCDLWHLIGKILLHYFSNNTNDIELLFQLLRALCFRFIPDVYFLRDFLQHTVAQSFTVNWKRNAFFYFVENFNNSFLSEELKAKIITAVIIPCFAVSFDKGEGNKLIGAPPTPYQEDEKNIVSVFINKVFDPDKQYDDAVRIALLQLACLLVERASQHIHDGDANNKRQGNKLRRLMTFAWPCLLSKSSVDPTARYHGHLLLSHIIARLAIHKKIVLQVFHSLLKGHALEARSIVKQALDVLTPAMPLRMEDGNTMLTHWTKKIIVEEGHAMQQLFHILQLIIRHYKVYFPVRHQLVQHLINYMQRLGFPPTASIEHKKLAVDLAEVIIKWELHRIKDDRETKTDGTEEELIQESSVKRSGIDLVETRKKSFDIIRETTVQGKCVMLLKMAMRPEIWPQPFDIKLNWLDKVLATVETPHHNLNNICTGIDFLTFLTTILSPDQLVSIIRPVQRGLSLCIIHQNTRIVRLMHMFLTRIMAIFPPDTQHKHEDLDLLYTAVSKMIAENLTSYEKSPQPNASSLFGTLMILKACTTNNASYIDRILVQFIRVLNHLTRDHINTIGGNTVISQSPDSNALPLELLVLSLELIKNRIFVMSVEIRKLFIGTILVSLIEKSTEVKIIKCIIKMLDEWIKTKEPNVMTQVPSIREKSALLVKLMQNVEKKFTDEIELNIQFLEIINFIYRDEILKQTELTNKLEGAFLNGLRFQNPNVRSKFFEILDSSMRRRLHDRLLYIICSQAWDTIGSHYWIKQCIELLILTANTMMQIQCSNEQFKIPSITSVIPVNSSETQENSFVSFLSSHSESFDIIQTVDDKDDVYDIDLNADRKEDCQQILPNRRVTLVELVYKQAEFLEANRNIRTDQMLVATSQLCHIDTQLAQSVWLSMFPRIWSIFTEDQRCNITKELIPFLSSGTNVNQKDCHPSTLNTFVESLTKCAPPIYIPPNLLAYLGKSHNLWHRAILVLEDMAVNQSMQSKDIDGGENQFSDLDVQQSNNIFDSLSKMYSSMHEEDLWAGLWLKFAHYPETNIAVSYEQMGFFEEAQGAYDLAMTKFKQDLSNGVVNTYVNSELLLWENHWMRCAKELNQWDILLDYAQTNKDKNMFLILESSWRVPDWNLMKIALAKTEQCYLKHYGFKINLYKGYLSILHQEERQTGNIERYVEIASSLCIREWRRLPNIVSHIHLPYLQASQQIMELHEASQIHQGLAQSRNNSLHDMKAIVKTWRNRLPIISDDLSHWSDIFTWRQHHYQIITQHLEQQSDQGSTMLGVHASAQAIISFGKIARKHNLTGVCQETLSRIYTIPSVPIVDCFQKIRQQVKCYLQMPSTSGKNEINEALEVIESTNLKYFTGEMNAEFYALKGLLLAQIGRSEEAGKSFSVAAQLHDGLTKAWAMWGDYMEQIFLKERKITLAVDALICYLQASRNQIESKTRKYIAKVLWFLSYDNNTKILISTLEKHVAGIPPSYWLPWIPQLLCCLEQFEGDVILNLLSQIGRLYPQAVYFPIRTLYLTLKIEQREKHKTAEQAVKSSCSNIDGTTLSFGRGASHGNIPSINPIKATPPMWRCSKVMQLQREVHPTILSSLEGIVDQMVWFRESWTEEVLRQLRQGLIKCYAIAFEKRDTVQHSTITPHTLHFVKKLGSTFGIGIENVPGSVTSSISNSAASESLARRAQVTFQDPVFQKMKEQFTNDFDFSKPGAMKLHNLISKLKTWIKVLETKVKKLPTSFLIEDKCRFLSNFSQKTAEVELPGELLIPLSSHYYVRIARFMPRVEIVQKNNTAARRLYIRGTNGKIYPYLVVLDSGLGDARREERVLQLKRMLNYYLEKQKETSRRFLNITVPRVVPISPQMRLAEDNPNSISLLKIFKKCCQSMQVDYDMPIVKYYDRLSEVQARGTPTTHTLLREIFSEIQWTMVPKTLLKHWALKTFLAATDFWHFRKMLTLQLALAFLCEHALNLTRLNADMMYLHQDSGLMNISYFKFDVNDDKCQLNQHRPVPFRLTPNVGEFITHFGITGPLSAAIVATARCFIQPNYKLSSILQTILRDEIIALQKKGFRECKLIEGSEDRYSDGNCMEHSVNIVNSAVDIIMTRFNKISYFDSIENKKISVLVQSATNIDNLCRMDPAWHPWL

SEQ ID NO: 63 - DNA, 1032 bp, Drosophila melanogaster
  Name: CG2336
  AE003674
  GI: 10727121
  Transcript: CT7778
gtaacggttaagtttaccttttaaatatttaaatctattaagtttgtaatatttccgattttaatgatgtacaacaaccgacccacggctatcagtctagaagaggaggttcaatatatctataagtaccctttgctgccgactccactgattgattatggatttatctacaatctggtttgcaacaagcctcgggatgtcagtgtgccgttgatcctagaaattgagacagagttcaagtccaaagacagtgctcctgagaagccaaagaaggtgcctaggctttcataccattcccgatcgagttcaatgagtgaagatgaaccggaaccggaagtgcaagttaaataccagtggaactcgccgcggctgatgattctctgcgaagatggagacatcaattgcgctttgcactatctcgttgagtctcttcacgatcccttcgcctgcaatgcggtggccactcttttcttgcaggaatccatattggaggagttcgtggatcgcataagggatcgcctggaaccgttgagcacggatatctccgggcatccggtttatataatgacactggagagaataggtcacttacaggcaaagagaatagttggaaatcccaagactgttccagaaaatgctagtcccatgctggtctacgaccttagccatcgttacttggctgatggacccaccggggtcataaccctgcacacctttcgaaccatgaaggaggccgttgagctgcaggctaaggaaccacttaactttacctctgtgtgcatttggaacgaaaaactggcagccgcctacgaactggtggcccgattaagtccgctgatcttcacgattaattgttactacgttaatctgaacgaaatcactctgcccttcgtttgcaactttaactccgcaaagattatcgacggctaccactacgagtcattgacctttaagggaaagcgcaaagtggttgtccatccagttggcaccatctgggcaaagttggcccgcgaggcactcgtccagtactga

SEQ ID NO: 64 - protein, 240 aa, Drosophila melanogaster
  AAF54111
  GI:7298905
MSEDEPEPEVQVKYQWNSPRLMILCEDGDINCALHYLVESLHDPFACNAVATLFLQESILEEFVDRIRDRLEPLSTDISGHPVYIMTLERIGHLQAKRIVGNPKTVPENASPMLVYDLSHRYLADGPTGVITLHTFRTMKEAVELQAKEPLNFTSVCIWNEKLAAAYELVARLSPLIFTINCYYVNLNEITLPFVCNFNSAKIIDGYHYESLTFKGKRKVVVHPVGTIWAKLAREALVQY

SEQ ID NO: 65 - DNA, 2981 bp, Drosophila melanogaster
  Name: TER94
  AE003831
  GI: 10727672
  Transcript: CT7768
ctgcctcatctttgaatttgactaaaagtgccgatttccagctcaacgaatagtccaagtcgcgccgaattgtacaattaagttaaaaagttcaacgtcaactagtttatcatggcagattccaagggtgaagatctggctacggcgatcctgaagcgcaaggaccgtcccaaccgactgattgtggaagaggcgcagaatgacgacaactctgtggtgtcgctatcgcaggcgaagatggatgagctgcagctcttccgtggcgacaccgtgattctgaagggcaagcgccgaaaggagacggtgtgcatcgtgctctcggacgacacctgtcccgacgagaagatccgcatgaaccgcgtggtgcgcaacaacctgtgcgtccatctttcagatgtggtttccgtgcagtcctgcccggacgtcaagtacggcaaacgggtgcgcatcctgcccatcgacgaaagcaccgaaggcgttaccggcaacctgttcgagatctatctgaagccgtacttcctagaggcctatcggccaatccacatgggcgacaactttattgtgcgcgccgccatgcgtcctattgagttcaaggtggtgctgaccgacccggagccctactgcatcgtagctcccgagacggtaatcttctgcgacggtgatccaattaagcgcgaggaggaggaggagtccctaaacgccgttggctacgatgatatcggtggttgccgcaagcagctggcccagatcaaggagatggttgagttgcctttgcggcatccatcgctcttcaaggccattggtgtgaagccaccgcgtggtattcttatgtacggtcccccgggtaccggtaagaccctgattgccagggctgtggccaacgagaccggagcctttttcttcctgattaacggaccggagatcatgtccaaactggccggagagtcggaatcgaatctgcgcaaggccttcgaggaagccgagaaaaactcgccggctatcatcttcatcgatgagatcgacgctattgcccccaagcgtgacaagacccacggtgaggtggagcgtcgcattgtgtcgcagcttttgaccctgatggatggcatgaagaagagctcccatctgatcgttatggctgctaccaacaggcccaactccattgacccggccctgcgtcgctttggacgttttgatcgtgagattgacatcggcattccagatgccactggacggctggaggtgctgcgcattcacaccaagaacatgaagctgcatgatgatgttgacctggagcagattgctgccgaatcccacggacatgtgggcgctgatctggcttcactctgctctgaggctgcccttcagcaaatccgtgagaagatggacctcatcgatttggaagacgataagatcgatgccgaggtgctggcgtcgctggccgtgacaatggagaacttccgctacgctatgaccaagtccagtccatcggcgctgcgtgaaactgttgttgaggtgcccaacaccacctggacagacatcggaggtctggagagcgtcaagaaggaattgcaggagctggtgcaatacccagtggagcatccggacaagttcttgaagtttggcatgcagcccagtcgcggtgtccttttctacggaccccctggttgcggtaagacgctgctggccaaggccattgccaacgagtgccaggcgaacttcatctcagtcaagggtcccgaactgctgaccatgtggttcggcgagtctgaggccaacgtgcgcgacatcttcgataaggcccgctcggcggctccttgtgtgctcttcttcgacgagctggactcgatcgccaaagcccgtggcggtaatgtcggcgatgctggcggcgccgctgatcgtgtgatcaatcagatccttaccgaaatggatggcatgggagccaagaagaatgtgttcatcatcggagccaccaatcgcccggacattatcgatccggccatcctccgtccgggccgtctggatcagttgatctatattccgctgcccgacgacaaatcgcgtgaggctatcctgaaggctaacttgcgcaagtcgccgctggccaaggaagtagaccttacctacatcgccaaggtgacgcagggcttctctggcgccgatctgaccgagatctgccagcgggcttgcaagctggccatccgacaggccatcgaggctgaaattcgtcgcgagaaggagcgcgccgaaaatcagaactccgcgatggacatggacgaggacgatccagtgccggagattactagcgcccacttcgaggaggccatgaagttcgctcgccgttcggtgtccgataatgacatcaggaagtacgagatgtttgcccagactttgcagcagtcccgtggattcggacagaacttcagattccccggtcaaaccggcaacacctcaggatctggtaacaacttgccagttaactcgcccggcgacaacggcgacgatgatctttacagttagatttctagttttacaccgcaaaacaaaaccacaaaatggaactttttaaatgaattttttccgtaaaaccgagcaagcaaaaccaatcacattcgcatcctggacgcggtaacttactacagcaaccattggctaagacatccagccgatggcgaaatcagatgacatacccgattcaatattcacttctttgataccatccttactcttggtcgcggatacgtgcagtaggagaaggttcccatttggatttgggctcgcctaatccgaaaccattttaattggcgaactattccgcgcctcacactaatcattcgtgcattgtcggtagagtggctccgatatatgagtttctataaacataattattaacgatacacatacacacatacatttaaagataaatacatatattaaacaccgtaaaattataagtgtatttggagctacatttttaagtgaat

SEQ ID NO: 66 - protein, 801 aa, Drosophila melanogaster
  AAF58863
  GI:7303816
MADSKGEDLATAILKRKDRPNRLIVEEAQNDDNSVVSLSQAKMDELQLFRGDTVILKGKRRKETVCIVLSDDTCPDEKIRMNRVVRNNLCVHLSDVVSVQSCPDVKYGKRVRILPIDESTEGVTGNLFEIYLKPYFLEAYRPIHMGDNFIVRAAMRPIEFKVVLTDPEPYCIVAPETVIFCDGDPIKREEEEESLNAVGYDDIGGCRKQLAQIKEMVELPLRHPSLFKAIGVKPPRGILMYGPPGTGKTLIARAVANETGAFFFLINGPEIMSKLAGESESNLRKAFEEAEKNSPAIIFIDEIDAIAPKRDKTHGEVERRIVSQLLTLMDGMKKSSHLIVMAATNRPNSIDPALRRFGRFDREIDIGIPDATGRLEVLRIHTKNMKLHDDVDLEQIAAESHGHVGADLASLCSEAALQQIREKMDLIDLEDDKIDAEVLASLAVTMENFRYAMTKSSPSALRETVVEVPNTTWTDIGGLESVKKELQELVQYPVEHPDKFLKFGMQPSRGVLFYGPPGCGKTLLAKAIANECQANFISVKGPELLTMWFGESEANVRDIFDKARSAAPCVLFFDELDSIAKARGGNVGDAGGAADRVINQILTEMDGMGAKKNVFIIGATNRPDIIDPAILRPGRLDQLIYIPLPDDKSREAILKANLRKSPLAKEVDLTYIAKVTQGFSGADLTEICQRACKLAIRQAIEAEIRREKERAENQNSAMDMDEDDPVPEITSAHFEEAMKFARRSVSDNDIRKYEMFAQTLQQSRGFGQNFRFPGQTGNTSGSGNNLPVNSPGDNGDDDLYS

SEQ ID NO: 67 - DNA, 1433 bp, Drosophila melanogaster
  Name: TER94
  AE003831
  GI: 10727672
  Transcript: CT7776
ccgatttccagctcaacgaatagtccaagtcgcgccgaattgtacaattaagttaaaaagttcttgaagtttggcatgcagcccagtcgcggtgtccttttctacggaccccctggttgcggtaagacgctgctggccaaggccattgccaacgagtgccaggcgaacttcatctcagtcaagggtcccgaactgctgaccatgtggttcggcgagtctgaggccaacgtgcgcgacatcttcgataaggcccgctcggcggctccttgtgtgctcttcttcgacgagctggactcgatcgccaaagcccgtggcggtaatgtcggcgatgctggcggcgccgctgatcgtgtgatcaatcagatccttaccgaaatggatggcatgggagccaagaagaatgtgttcatcatcggagccaccaatcgcccggacattatcgatccggccatcctccgtccgggccgtctggatcagttgatctatattccgctgcccgacgacaaatcgcgtgaggctatcctgaaggctaacttgcgcaagtcgccgctggccaaggaagtagaccttacctacatcgccaaggtgacgcagggcttctctggcgccgatctgaccgagatctgccagcgggcttgcaagctggccatccgacaggccatcgaggctgaaattcgtcgcgagaaggagcgcgccgaaaatcagaactccgcgatggacatggacgaggacgatccagtgccggagattactagcgcccacttcgaggaggccatgaagttcgctcgccgttcggtgtccgataatgacatcaggaagtacgagatgtttgcccagactttgcagcagtcccgtggattcggacagaacttcagattccccggtcaaaccggcaacacctcaggatctggtaacaacttgccagttaactcgcccggcgacaacggcgacgatgatctttacagttagatttctagttttacaccgcaaaacaaaaccacaaaatggaactttttaaatgaattttttccgtaaaaccgagcaagcaaaaccaatcacattcgcatcctggacgcggtaacttactacagcaaccattggctaagacatccagccgatggcgaaatcagatgacatacccgattcaatattcacttctttgataccatccttactcttggtcgcggatacgtgcagtaggagaaggttcccatttggatttgggctcgcctaatccgaaaccattttaattggcgaactattccgcgcctcacactaatcattcgtgcattgtcggtagagtggctccgatatatgagtttctataaacataattattaacgatacacatacacacatacatttaaagataaatacatatattaaacaccgtaaaattataagtgtatttggagctacatttttaagtgaat

SEQ ID NO: 68 - protein, 297 aa, Drosophila melanogaster
  AAF58864
  GI:7303817
MQPSRGVLFYGPPGCGKTLLAKAIANECQANFISVKGPELLTMWFGESEANVRDIFDKARSAAPCVLFFDELDSIAKARGGNVGDAGGAADRVINQILTEMDGMGAKKNVFIIGATNRPDIIDPAILRPGRLDQLIYIPLPDDKSREAILKANLRKSPLAKEVDLTYIAKVTQGFSGADLTEICQRACKLAIRQAIEAEIRREKERAENQNSAMDMDEDDPVPEITSAHFEEAMKFARRSVSDNDIRKYEMFAQTLQQSRGFGQNFRFPGQTGNTSGSGNNLPVNSPGDNGDDDLYS

SEQ ID NO: 69 - DNA, 7326 bp, Drosophila melanogaster
  Name: CG6313
  AE003746
  GI: 10726739
  Transcript: CT19662
atggcctactctatttctccggcatctccacttccctcgcccactggcagcggcaactatgtcgatcagcagctgcaacagcagtccatggatgttgctctacagcgcaagacggccatggacgatttccgtggcatgttggagacggcggtaaatggtccaaggggcagaaaagacctggctcttaacacaccacagctgaacttcttcaaggacggctggcatatggtgggagtgcacaatttctttggtgatcagccaaagtcgcccactgaaacaccgcctgaaatggaggagactaccatgtcctcaccgaccgaagcagatcgtctcggatcggagcctcgggccgagatgaagaacttggccacgctctgctcggccgcagcagcagctgctgctgtggcagcggttaacaaggatcaggttgagattagttcggatcttgagagcgaatgcgaggatgatgcagaagacgcggaggtggacaacgatggtgaagtagactacatcgacgaagacgaaggtggtggagaaggcgaagaagaagaagatgatgcagatgatgacgagttcttcttggacgagcctgatagcgaccaaggaactggcaacaataataacaattccaaaagcggcgccagttcgttgccattgaaacagcgcaaaatggccactcggttggaaaacctaatcctaaactcgcagacagtgtgcgacttcccgcctgaacttagcaactcggaactggttcatgtcctgccccaaataagcaatctcaaggcagcggccaacagcaacgcggctctgaacagcgtactccagcagcagttggcagcagcctccgcggcagcggcgcacgccaaagcgtctgtagtccaccagaagcagcagcatggagagggagatcagcaatgcgaagatgacggcagtgccagcgcaagtgagctatattcgggtttggagcactttgccaatgatggcgaaatggaggatatattccaggaattggcaagtagcctaaactatcccgagcttgccgagtttagcctcaatcagatgtgcaagggtcgatttgctggaaattgggcgcaatcttccggcaagtggactggtcaggagcagttggtgggtgtggtaaggtcgccgggtctcattaacccaggcgatgttccgcaggatgcccagcgacaggcgaatcttgtcctcctcgactatcccatgcagcaaaacatccaactagagcagcggctactcgatgctgaggaaatgcacctgcagcaacaccagcaaacaccgctctccttactgccctttacggatgagcagcagcagcagcttcatcaccaagctttgtccaatgcatccgattttcagcaacaccaacagcttgccctggaaaacgatccagaactaaagcagcagcttcagcagaactccaacgcgcgcataattaaagctgttgctgcccagcatcagcagcagcctccaaccaacttcgtttacaacgtggaaagcggcgacaagaatgctccgccagtgcaattgctcttccagttgccaccacacatggcgcaacatcaggcgcagcaacagcagggcgttggagagcctcttaccgaacagcaacagcagcagttacacgctgagcaggcgcatctctttcagcatcgaactggcggtcagcgtccgcccacccagagtgagttagagcaggtggctcaagagctattgcttcagcgaagcggccaggtgccggcaggagctcctgttgttggtgttcaggcaattccactcaagcaaaaacactttaacctgcatccgccgccgtgtccacccacctgtgtccagcatcaggtggccacgcagacgcatcctgcttctgttgtagtgccgcagcctgctgtaggatatacacaattcgctcttcaggcctctcagcaacagcaaatgcaacaaaacgagctctccatttggccgatggccacgcctactcccgcgcccagcagcggtgtaagctcgaccaagtcgatgcccggcggcattgccaaaaaggccattgacaagcagtcgcgcaaggaacgtcgttgcgtggtgcgccagacaccagcaggcattcaagagaacaccaaactccatctacagcctcaggtcgcaacagcccagcaacaatttctagtgcagaaccagttagcagttgcgaccaccgtgagtttggacaagactatcgaaatagattcagagacggaatccaaccacgacacggcgctaaccttggcttgtgccggcggtcatgaagagctggtggaactgttgatcaataggggagcaaacatcgagcaccgtgataagaagggattcacaccgcttatactagccgctaccgctggccacgacaaagtcgtggacattctgctcaagcacagcgctgagttggaggctcaatcagagcgtacgaaggatacaccgttgtccctggcatgttctggcggccgatacgaggtggtggaacttctgcttagcgttggtgccaacaaggagcaccgcaatgtatctgattacactccactgagcttggcagccagtgggggctatgtgaacatcattaaactgttgcttagccatggagcagagatcaattcgcgaacgggcagcaaactgggcatttcaccgcttatgctagccgctatgaatggtcatacgccggcggttaagttgcttttagatcagggatcggacataaatgcccagatcgagacgaatcgcaatacggccttgactttggcttgcttccagggcagacacgaggtcgtaagtctgctgcttgaccgacgggccaatgtggagcatcgagctaagacgggcctgaccccactcatggaagccgcgtcaggcggttacatagaggttggtcgcgttctgctggacaagggtgcggatgtgaatgctgctccggtgccgacgtccagggatacggctctaacaattgccgccgacaagggccatcaaaagttcgtggagctcctgctatctcgtaatgccagcgtagaggtaaaaaataagaagggtaactccccactctggctggctgcccatggtggtcacctgagtgtggttgagcttttgtacgaccataatgctgacattgactcacaggataatcgacgtgtttcctgtctgatggctgccttccgcaaggggcacaccaagattgtgaagtggatggtgcagtatgtgtcccagtttccctctgaccaggagatgattcgcttcattggtaccataagtgacaaggagctgatagacaagtgttttgactgcatgaagatcctgcgtagcgccaaagaggcccaggccgtcaaggccaataagaatgcttcgatccttttggaggagctggatttggagcggactcgcgaagagagccgcaaagctgccgccgcccgtcgtcgtgagcgcaagaagaagaagaagatggagaagaaagaggagaagcgccgtcaacaacagggcaatgggcctggcggagacgatatgcaaggcgatgacgatgacgccagtgacaaggatgatgattccgacaaggacgatgaagacgaggaggcagcgccggccgccgcccgcgaggagggagactctggcatcgatcagggctcgtgctccagcggagacaccaaaggtgcgcgcttcggtggcagtcagtccgctcaggctgcggaagcggcagccaattccgtgtccaccaacagtcagggaaagaagaacaagaagcaggcgaaaaacaaggtgttgatatcggtggaaccaactcaaccagtaatcacatcgaactccgtcctcaagggcgtctgtgcgaagaagcatcccgcagtggaagttgtaaagcaacctcctgccacacaacaggctgctcctcttaagcggcaactcgatgtaaagaaggaggaacctgcgctcaaaaagaaggaagagaaaaacagctcgtccagcagcagcagcaagcgtgagaaagagaatcttgcgcccaaggaggttgcactgccagccaagcagcagcccagtagctccagcaaactgcagagcagcgagtctgcgagcaacataaacagcagcaccgctaccaacaccagtagcgccaatactactcggaaggaagttgcaaagccagcgtcacaaactgcgagtgccaccactttgaatcctgcaaagcgcaccgaagtcgatggctggaaggaagtagtccgcaaaagtagcgcccagcagaccacagcggtgggagcgagtggagccccactgcctgtcacagccaccagttcggccaccagtgtgcaacatcatccgcaccaccacctagccaacagctccagcaacagctcaagctccctgaccaccagcactactacagcagcgtcttcggttcccgagatgacgtgcaagaaggtgcaagtgcccgtaaatgccatctccagggttattggacgaggtggaagcaacattaacgccattcgggccaccactggtgctcacatcgaggtggagaagcagggcaagaaccaatcagagcgttgcatcacgatcaagggcttaaccgatgctacaaaacaggcacatatgctcattttggcactaatcaaggatcccgatgtggacatattgcaaatgctgcccaggattaacagcagtattaagcaggcgtctagtggcggagcaagcaccccgatgtccgtgggaacttgggacaatcgcaccgctgccggtgtgaatgcgtataccttttcttctgccgcgtccaccacctccacatcctccagctcgtcagctagctctactacaccagcgggagcttcgtacagcaatgcgcacaagcagcaccaacagcagccgcagtcagtgaagggcccaagtggacggtcatcaacgtcggtcaagtctaatggcagtagcaccaaggtatcggcttcgagtggatcgggttcccggagcggcagggctggcagtagctatcttgcccaacagcagcctggtcgcagctctggaggtggctcttcaaatggcgtgatcaagagcaagtcagaaagctcttccaaatccctgccagctgcacaaaagagcagtaccactttgggtaaatcatcgactgtgtcaccgggtgcacagaatttcgcaaaggcagcggctattggacagtcctcgcccaaaaaggctgagggtggtgctacatctgcggtggtcacctctgccggtggacgcagcagtggcgtggtggctccatttggacgtggcaagcctgtagctggccaaggaggacctgcagcaacggcggcttccaacgttgcccagctgggaagtgtgagtggcaacagcaacatattggctggaccaattggcacctttaatgtagcggatgtggctgctgtgaatgcagccgcggcagcaggagcagcagcagctaccaacagcaatgtgaaacccattgctcccattgcaccgcccagtaagcgagttggatctcccacccaagtccagcaacagcatcaaacacagcagcagcaacaacagcaactaccccagcccgcaccagttcctggcccacagccacaacaacagccgcttcagcagcagcaacaacaacaagctcctcagcagcagccacaacagccaaaccagcaacagcaaccacagacgtcccagcaaaatctcgtgatcaatacaaacctactgaacgatctgatggccgccagtgcagcaaacaccaccagcgatagcttcagtgcccagctagcagccaagttgtctagcgcatattccctgttcagtgactaccagcagtcgcagtggggcaagttgggtgatccaggcatcggcggtggagcaggagctgttggcgatggtctgccgcaagcggatgcttccaaggcaccaggatacaatcgcaacatccttagctcgcccgttggcagttccaaggcctcgtcgaatcactccacctcgcctcctgtgggtaatgtgatccaacagcagcagcagcagcaaccgcaatctagccaacaagctctcaacattatcaccagtggaccaggagggcctgctacagcaccagccagatcaccgatggtgtccgccaacgagggcaatcccgctgtgggtcaaccctccatgaatggaacccaaggattgggtgagacggctcctgctcattcaccaggcgttatcaaaccgcccacggccacagttcccatccagcgtcatgtgcccatgccgatctctgcgccggaggccggagcaccgcccacatttggagcgattggttccaacccagctagcggtaacaattctgcggctgcccaagccgcagctgccgccgccgcctcggcgatgatcgatcgtcagcagcagaatttgcagaatctgcagactttgcaaaatttgcaaaggatggtgggagcctcgcagcagcagcagccacaacagcagctgaactatccaatggaccccacatcgtcgttcatcgtggatgctaataacgtactgcgcctgaatccacgcgtcatctttccgcaaggcaacaccaagccaccgcagccaccgccgcagggtggaacgcagtcgaatgtgtttggaggaaatccaggcagacaaccacctggaacgggtgccagacagccaggaggagcagctgcacagcgttggtatggcggcactctggagtatccttcatacacgggccgtgatatgctgcacctggagaatggtgccggcggaatggcgggtatgggctcaccatctgccatgtcgcccaaccacgacgacattcgcaagatgccgcgccccataggcactgagcgagccgcatcatggaagtacaacaactttaacgttggaggcccgtcacttaacatggaagatgctctagccagtgtgttgcccccatgggcacatgagcttaaggctcagcctccaggtttgcagcagccgcctcctccgccgcagtcgcagcagcaacagcaacaaccgctcaactggctaaagcagcagccgcagcagcagcagtacagggcctacaacaacggaccctatccgcagcagcagcagcagcatgagccaatgaatatgcccatggactaccacaacatgcaggcacctccaaatatgagccagcagcagcagcagcacgtcaacttgatgccctcctacggctaccagcattttgtgggcgctcctggagccgttgacatctccgcacatatgccggacaagatggaggtgtgggatcaccacgataaacacatgccctggaccaactataccaccaactggtccaactga

SEQ ID NO: 70 - protein, 748 aa, Drosophila melanogaster
  AAF56267
  GI:7301133
MEAASAGHLDIVKLLLNHNADVNAHCATGNTPLMFACAGGQVDVVKVLLKHGANVEEQNENGHTPLMEAASAGHVEVAKVLLEHGAGINTHSNEFKESALTLACYKGHLDMVRFLLQAGADQEHKTDEMHTALMEASMDGHVEVARLLLDSGAQVNMPTDSFESPLTLAACGGHVELATLLIERGANIEEVNDEGYTPLMEAAREGHEEMVALLLSKGANINATTEETQETALTLACCGGFMEVAAFLIKEGANLELGASTPLMEASQEGHTDLVSFLLKKKANVHAETQTGDTALTHACENGHTDAAGVLLSYGAELEHESEGGRTPLMKACRAGHLCTVKFLIQKGANVNKQTTSNDHTALSLACAGGHQSVVELLLKNNADPFHKLKDNSTMLIEASKGGHTRVVELLFRYPNISPTENAASANVTQAAPTSNQPGPNQMRQKIMKQQLQHQLQQLNAPPGLHELSEAARASNQQHFHQQQFSSAGNGSSNIVAMGTGDFLDAGELQLTATAGMSAGAGTSTTGSETGMEEYGEVGGIDLTTLGAQQQEGLIAKSRLFHLQQQQQQQQQQQQQQQQQQQQQQQQQQQQQQPPAAGQHQLVPCKHFDLDMEHINSLQPPQKAPPAPPVLFHTVCQQPVMQQQQQQLQPGQLKLKAMLPNRNRALKTAEVVEFIDCPVDQQQPGEQVRTQPLGEDGKTPQFACAGEDPRLQRRRGFMPELKKGELPPESSSSDPNELALKAGGTVDQ

SEQ ID NO: 71 - DNA, 1326 bp, Drosophila melanogaster
  Name: aur
  AE003693
  GI: 10726473
  Transcript: CT10220
agtcgtgaatgttttacccaatatcggctttcattgttaactgaccaaaattgtaatctgttctgttagttgtcgagtgcctgtgccgtcatgtcccatccgtctgaccatgtgctgcgtcccaaggaaaatgctccgcacagaatgccagaaaaatcagctgcagtgcacaatatgcaaaagaacttgctattgggaaagaagcccaacagcgagaatatggctccagctagcaaacccttgccaggatcctctggcgctttgatcaggaagccaggcctaggaggctccaattccatagcttcctccgaaggaaacaacttccaaaaacccatggtgccgtccgtgaagaagaccacatcagagtttgctgctccggctccagtagcacctatcaagaagcctgagtcactttccaagcagaaacccactgctgcgagctctgaatcctccaaggaactgggtgcggccagcagctccgctgaaaaagagaaaaccaagactgaaacccagccccagaagccgaagaagacctgggagctcaacaactttgatattggtcgcctgctgggacggggcaagtttggcaacgtttatttggcgcgggaaaaggaatcccagttcgtggtggccctaaaagtgctctttaagcgccagattggcgagtccaatgtggagcaccaggtgcgtcgtgagatcgagatacaatcgcacctacgtcatccgcatatcctgcgtctgtatgcctactttcacgacgacgtgcgcatatatctgatcttggagtatgcgccacaaggaacgcttttcaacgccttgcaggcacagccgatgaaacgtttcgatgaacgccagtcggccacctatattcaggcgttgtgctcggcgctgctctatctgcatgagcgggacatcatacacagggacatcaagccggagaacttgctgctcgggcacaagggcgtcctgaagatcgccgacttcggttggtccgtgcacgagccgaactccatgcgcatgacactgtgcggcactgtcgactacttgccacccgaaatggttcagggcaagccgcacacgaaaaacgtggatctatggagcctgggtgtgctctgctttgagctgctagtgggccacgctcccttctactcgaagaactatgacgagacctacaagaagattctcaaggtggactacaaactgccggagcacatttccaaggcagcatcccatctcatttccaagctgctggtccttaatccgcagcaccgcctaccgctggatcaggtgatggtgcatccttggatcctggcgcacacgcagtga

SEQ ID NO: 72 - protein, 411 aa, Drosophila melanogaster
  AAF54723
  GI:7299536
MSHPSDHVLRPKENAPHRMPEKSAAVHNMQKNLLLGKKPNSENMAPASKPLPGSSGALIRKPGLGGSNSIASSEGNNFQKPMVPSVKKTTSEFAAPAPVAPIKKPESLSKQKPTAASSESSKELGAASSSAEKEKTKTETQPQKPKKTWELNNFDIGRLLGRGKFGNVYLAREKESQFVVALKVLFKRQIGESNVEHQVRREIEIQSHLRHPHILRLYAYFHDDVRIYLILEYAPQGTLFNALQAQPMKRFDERQSATYIQALCSALLYLHERDIIHRDIKPENLLLGHKGVLKIADFGWSVHEPNSMRMTLCGTVDYLPPEMVQGKPHTKNVDLWSLGVLCFELLVGHAPFYSKNYDETYKKILKVDYKLPEHISKAASHLISKLLVLNPQHRLPLDQVMVHPWILAHTQ

SEQ ID NO: 73 - DNA, 2541 bp, Drosophila melanogaster
  Name: Pk91C
  AE003723
  GI: 10799498
  Transcript: CL90028
atggaaaacgccgatgcgacttcgcaatcggatgtccacatcgactacaaaacccccaagaagacccactcgctgatcgacagtgagcagttgctggacaagatcaacatccttaccaccaagccggagaatcactcccagaatgccaagcttcccactatcaaggattttgtcatcattaagccaatcagccgcggcgcctttggaaaagtcttcctgggctacaagaacaacgactcgaagcggctgttcgccatcaaggtgatgcgcaagtcagagatgatcaacaagaacatggtgtcccaggtaatcacggagcggaatgccctggccctctcccgctctcagttctgtgtcagtctcttctactccctgcaatcgctctcctacgtctacctggtgatggagtacatggtgggcggggatctcaagtcactgctggccatgtttgggtattttgacgagcccacggcccggttctacgtggccgagatggtgatggcgctgcagtatctgcatcagcacggaattgtccacagagatattaaaccggacaacatgttgctctcctccagtggccatgtgaagcttactgattttgggttgagcaaaatcgatatgcgaagagatctggaaatatcagaccttataaactgctcaccgaatttaaacgcccgcacgccgggccagcttttgtcgcttacttcgcacctgtcttttgggtcagagaagaaactgaatgacttcggttctgtttcaagtggacaaaacaacggaatgggctcggtggccacggggacatcccacttgctgcaggccatcaacaagcatagtctgataatggagctgtcggatagcgagggcgacacctcgctcaatgatgcagagaagacgagcgatagcaagatatctggtgtttcccccttcttttctgccgaggaggccaatgaatccattactcatacctgcactacaaacgtaaatccccaggatagcagctcgtcttgttcgttccacacttgtaactcggccgacctgagcaagtgctcaccaccactggagtcaaaggacggtgctgctgcgggcaatgcgatccccagcaagcggcgcgtggaattcgtcttggatgcggcaccctgtcagggctgcaagctggccgagcaagacagcagcaacatggccaccaatgatggcaaacatttgcccaagatagataacgcaatcgaggcttcgtttgagttttccatggtgcgcaggcgatcggtcgacgagcgaaatcgcatctcaaaggggccggaggattcaggggtgtccagtcgcaagggcgacgactattccagctgccacttgaatctgaatagcgagagcacggcttcgtcgattgagaagaatgtggacaacctaagccaatccaaggaggattttagctgttcagattactcgcgcagttataacgtgaccaacggcaacgagatgagtggcatcaacatgaactcgccgtttcggaatctgtccaagcactttaaacgccccgacttcctgcgcggcatgaagcgaaagatcaatttggtcaatcgctccgacaacatgtccagcatggataccgatggctgcagttcaagcaatggaagtaccaacaccggactaacacaggaaattgaaatccttaatattggcagcagcacgcccaagaagcgcaaggcccgttcctcgcccatccgtggtgtgctaaaggtgcgctctttatccgatgacgaaatgcccataaatcatttgcttggtccggaagcaaatgtggccaacgtggtcttctctacgcccgtatcttcacagaagttgccacgtcgggatggtggtcttcttggaaagctcaaggccactcggttcgctcttccgctgtccattgagaacaagaaacgggagcatgcgaccgccgataagatgtcaggcattcagtaccatctgaaactgtccgacgatcccacgatgtcgcctatcaatcatggagccggcaatctaccaaagacgccgaaaaacgttaacatcaataccccgttccgcacaccgaaatcagtgcgtcgcggggctcgcgtgtctaatgagcgcatcttgggcacacctgattatctggcgccggagttactgctgaagcaaggtcacggtccggccgtcgactggtgggctctgggcgtctgtttctacgagttcatgaccggcattccaccctttaacgacgagacacctcagaaagtatttgacaacattctgaataagaacatcgaatggccagaaggtgatgaggcattatccgtcgaatccatggaggctgtggaactgctcctgaccatggatcccaatgagcgaccggccgcaaaggaagtgcaacaaatgcgtcactttgcttgcatcgactgggagaatataggcaataccgagcccccatttgtcccgacaccagacaatcccactgatacgggatatttcgatgcgcgcaacaatcttcagcacctgcagctgtccaattttgccctagaagaatga

SEQ ID NO: 74 - protein, 846 aa, Drosophila melanogaster
  AAF55594
  GI:7300437
MENADATSQSDVHIDYKTPKKTHSLIDSEQLLDKINILTTKPENHSQNAKLPTIKDFVIIKPISRGAFGKVFLGYKNNDSKRLFAIKVMRKSEMINKNMVSQVITERNALALSRSQFCVSLFYSLQSLSYVYLVMEYMVGGDLKSLLAMFGYFDEPTARFYVAEMVMALQYLHQHGIVHRDIKPDNMLLSSSGHVKLTDFGLSKIDMRRDLEISDLINCSPNLNARTPGQLLSLTSHLSFGSEKKLNDFGSVSSGQNNGMGSVATGTSHLLQAINKHSLIMELSDSEGDTSLNDAEKTSDSKISGVSPFFSAEEANESITHTCTTNVNPQDSSSSCSFHTCNSADLSKCSPPLESKDGAAAGNAIPSKRRVEFVLDAAPCQGCKLAEQDSSNMATNDGKHLPKIDNAIEASFEFSMVRRRSVDERNRISKGPEDSGVSSRKGDDYSSCHLNLNSESTASSIEKNVDNLSQSKEDFSCSDYSRSYNVTNGNEMSGINMNSPFRNLSKHFKRPDFLRGMKRKINLVNRSDNMSSMDTDGCSSSNGSTNTGLTQEIEILNIGSSTPKKRKARSSPIRGVLKVRSLSDDEMPINHLLGPEANVANVVFSTPVSSQKLPRRDGGLLGKLKATRFALPLSIENKKREHATADKMSGIQYHLKLSDDPTMSPINHGAGNLPKTPKNVNINTPFRTPKSVRRGARVSNERILGTPDYLAPELLLKQGHGPAVDWWALGVCFYEFMTGIPPFNDETPQKVFDNILNKNIEWPEGDEALSVESMEAVELLLTMDPNERPAAKEVQQMRHFACIDWENIGNTEPPFVPTPDNPTDTGYFDARNNLQHLQLSNFALEE

SEQ ID NO: 75 - DNA, 4528 bp, Drosophila melanogaster
  Name: Top2
  AE003663
  GI: 10728874
  Transcript: CT28703
cttgccagctctaaaaccagcaatacttctcatttgttgtcggttgtgaaaagttgttaaatgtgctgtgcgtattttaatagttagttgagaactgtacaagttttagctaaaggcagcagacgcgtggggcacgtacaagtcgaaaattgtagtgcaccgcctcgtgtatcgcctgcaacatagagttttgccgcacttcggttgtcggcggcagcaagaaaaggccacaaatacttggcaattttttaaccagatggagaacggaaacaaggccctgtccatcgaacagatgtaccagaagaagtcgcagctggagcacatcctgctgcgacccgactcgtacatcggatccgtggagttcaccaaggagctgatgtgggtgtatgacaactcccaaaaccgcatggtgcagaaggagatctctttcgtgcccggcctctacaagatattcgacgagattcttgtgaatgcggcagataacaagcagcgagacaagagcatgaacaccattaagatcgacatcgatccggagcgcaatatggtgtccgtgtggaacaacggccagggcattccggtgaccatgcacaaggagcagaagatgtacgttccaacgatgatctttggtcatctgctgacctcgtcgaactacaacgacgatgagaagaaggtcactggcggcaggaacggatacggagcgaagctctgcaacatattctccaccagcttcaccgttgagactgccacgagggaatacaagaaaagtttcaagcagacttggggaaacaacatgggaaaagcctccgatgtgcagatcaaggacttcaatggcactgactacacacgcatcacattcagtcccgatctggccaagttcaagatggaccgtctcgatgaagatattgtggctctaatgtcgcgtcgcgcctacgatgtggccgcctcatccaagggagtatccgtcttcttaaacggcaacaaactgggtatagtccacgaggttgccaacgagcgttgggaggtggcttgctgtccttcagatcgaggcttccaacaggtctcgtttgtcaactcgatagctacctacaagggcggtcggcatgtggaccatgtggtagacaatctcattaagcagctgctcgaggttctgaagaaaaagaacaaaggtggcatcaacatcaagccattccaggtccgaaaccatctgtgggtttttgtcaactgcttgatagagaaccccactttcgactcgcagaccaaggagaacatgactctgcaacaaaagggcttcggttccaagtgtaccctctcggaaaagttcatcaacaacatgtccaagtctggcatcgtggagtctgtgctggcatgggccaagttcaaggcccaaaatgacattgccaagacgggcggtcgcaagtcaagcaagatcaagggcattcccaagctggaggacgctaacgaggcgggtggaaagaactcgattaaatgcaccctcatcctcaccgagggagactcagccaagtcattggccgtatccggtttgggcgtgatcggacgagatctctacggcgtgttcccgcttaggggtaaacttctaaatgtgcgggaagctaatttcaagcagctttcggagaatgccgaaatcaacaatttatgcaagataattggcttgcaatacaaaaagaagtacctcactgaggacgatctaaaaactctgcgctatggcaaagtgatgatcatgacagatcaggatcaggatggctcccacatcaagggtctcttgatcaactttatccacaccaattggccagagcttctgcgtctgcccttcctcgaggagttcattacaccaattgtgaaggcaaccaagaaaaacgaggagctgtcattctactcgctacccgaattcgaggagtggaaaaatgatacagctaatcaccatacgtacaatataaagtactataagggtttgggtacttcgacctccaaggaggcgaaagagtattttcaagacatggatcgccatcgcatcttatttaagtacgatggatcggtggatgatgagagcattgttatggccttctccaagaagcacatcgagtcgcgaaaggtatggcttaccaaccacatggacgaggtgaagcgtcgcaaggagctcggtttgccagagcgatatctctacaccaagggcaccaagagcatcacctatgcagactttatcaatctggagttggtgctgttctcgaatgctgacaatgagcgctccattcctagtctggtggatggcttgaagccgggtcagcggaaggtgatgttcacttgcttcaagaggaatgacaagcgtgaggtgaaggtggcccagctatccggatcagtggcggagatgtcagcctatcaccacggagaggtatccctacagatgacaatcgtgaatctggctcagaattttgtgggtgccaacaacattaatctgcttgagccacgcggtcaatttggtacccgcttgtcgggaggcaaagattgcgccagcgctcgttacattttcactataatgtctcccttgacgcgactcatctaccatcctttggacgatccacttttggattaccaggtggacgatggccaaaagatcgagccactatggtatctgcccatcataccgatggtattggtaaacggagccgagggcataggaactggatggtccacgaagatatccaactacaatcctcgtgagattatgaaaaatctaaggaagatgataaacggacaagagccaagtgtgatgcatccgtggtacaagaactttttaggacgcatggagtatgtttcggatggtcgttatattcagactggtaacattcaaattttgtccggaaaccgtttagaaatcagtgaactccctgtgggcgtatggacgcaaaactacaaggaaaatgtcctggagcctttatcaaacggcaccgaaaaggttaagggtattatttccgagtacagggagtatcatacagacaccaccgttcgctttgtgatcagtttcgcacctggagaatttgagcgcattcatgcagaagaaggtggtttctaccgagtgttcaaacttaccacgacgctgtccaccaaccagatgcatgcgttcgaccagaacaactgtctgcgacgcttccccaccgcgatcgatatccttaaagagtattacaaactgcgacgagagtactacgcccgccggagggactttttggtcggccagctcacggcgcaggctgatcgcctcagtgatcaggcgcgctttattctcgaaaagtgtgagaagaagctggtggtggagaacaagcagcgcaaggccatgtgtgatgagttgttgaagcgtggatatcgtcccgatcccgtcaaggagtggcagcgccgcattaaaatggaggatgccgagcaagctgacgaagaggacgaagaagaagaggaggcagctcccagtgtcagctcaaaggctaagaaggaaaaggaagtcgatccggaaaaggcctttaagaaactaactgatgtcaaaaagtttgactaccttctgggtatgtccatgtggatgttgacagaggagaagaaaaacgagctactcaaacagcgcgacactaaactgtccgagttggaaagtctgcgcaagaagacgccggagatgctttggctggatgatttggatgccctcgaatcgaagttaaatgaagtagaggagaaggagcgcgcagaagagcaggggatcaatctcaagaccgcgaaggctttgaagggccagaagtcggcctcagctaagggcagaaaggttaagtcaatgggaggcggagcgggtgccggagacgtattcccagatcccgatggagaacccgtcgagtttaagatcaccgaagaaatcattaagaaaatggcagcggctgccaaggtagctcaggcggctaaggagccgaagaaacccaaagagcccaaggagccaaaagtgaagaaggaaccgaagggcaagcagattaaagccgaacctgatgccagcggcgatgaggtggacgaatttgatgcaatggtcgagggcggctctaagacctcacccaaggccaagaaggcggttgtcaagaaggagccgggagaaaaaaagccgcgccaaaagaaggagaacggcggcgggctcaagcagagcaagattgacttcagcaaggccaaggcgaaaaagagcgacgatgacgtggaggaagtaactcctcgtgcagagcgtcctggacgtcgacaggccagtaagaagatagactacagctcgctcttctcggatgaggaggaagacggtggcaacgttggctctgatgatgatggcaatgccagcgatgatgattcgcccaagcgtccagctaagcgtggacgagaggatgagagcagtggaggagccaaaaagaaagctccgcccaagaagaggcgagctgtaattgaaagcgatgatgatgatatcgagattgatgaagatgatgatgatgattctgattttaattgttaa

SEQ ID NO: 76 - protein, 1447 aa, Drosophila melanogaster
  AAF53802
  GI:7298585
MENGNKALSIEQMYQKKSQLEHILLRPDSYIGSVEFTKELMWVYDNSQNRMVQKEISFVPGLYKIFDEILVNAADNKQRDKSMNTIKIDIDPERNMVSVWNNGQGIPVTMHKEQKMYVPTMIFGHLLTSSNYNDDEKKVTGGRNGYGAKLCNIFSTSFTVETATREYKKSFKQTWGNNMGKASDVQIKDFNGTDYTRITFSPDLAKFKMDRLDEDIVALMSRRAYDVAASSKGVSVFLNGNKLGVRNFKDYIDLHIKNTDDDSGPPIKIVHEVANERWEVACCPSDRGFQQVSFVNSIATYKGGRHVDHVVDNLIKQLLEVLKKKNKGGINIKPFQVRNHLWVFVNCLIENPTFDSQTKENMTLQQKGFGSKCTLSEKFINNMSKSGIVESVLAWAKFKAQNDIAKTGGRKSSKIKGIPKLEDANEAGGKNSIKCTLILTEGDSAKSLAVSGLGVIGRDLYGVFPLRGKLLNVREANFKQLSENAEINNLCKIIGLQYKKKYLTEDDLKTLRYGKVMIMTDQDQDGSHIKGLLINFIHTNWPELLRLPFLEEFITPIVKATKKNEELSFYSLPEFEEWKNDTANHHTYNIKYYKGLGTSTSKEAKEYFQDMDRHRILFKYDGSVDDESIVMAFSKKHIESRKVWLTNHMDEVKRRKELGLPERYLYTKGTKSITYADFINLELVLFSNADNERSIPSLVDGLKPGQRKVMFTCFKRNDKREVKVAQLSGSVAEMSAYHHGEVSLQMTIVNLAQNFVGANNINLLEPRGQFGTRLSGGKDCASARYIFTIMSPLTRLIYHPLDDPLLDYQVDDGQKIEPLWYLPIIPMVLVNGAEGIGTGWSTKISNYNPREIMKNLRKMINGQEPSVMHPWYKNFLGRMEYVSDGRYIQTGNIQILSGNRLEISELPVGVWTQNYKENVLEPLSNGTEKVKGIISEYREYHTDTTVRFVISFAPGEFERIHAEEGGFYRVFKLTTTLSTNQMHAFDQNNCLRRFPTAIDILKEYYKLRREYYARRRDFLVGQLTAQADRLSDQARFILEKCEKKLVVENKQRKAMCDELLKRGYRPDPVKEWQRRIKMEDAEQADEEDEEEEEAAPSVSSKAKKEKEVDPEKAFKKLTDVKKFDYLLGMSMWMLTEEKKNELLKQRDTKLSELESLRKKTPEMLWLDDLDALESKLNEVEEKERAEEQGINLKTAKALKGQKSASAKGRKVKSMGGGAGAGDVFPDPDGEPVEFKITEEIIKKMAAAAKVAQAAKEPKKPKEPKEPKVKKEPKGKQIKAEPDASGDEVDEFDAMVEGGSKTSPKAKKAVVKKEPGEKKPRQKKENGGGLKQSKIDFSKAKAKKSDDDVEEVTPRAERPGRRQASKKIDYSSLFSDEEEDGGNVGSDDDGNASDDDSPKRPAKRGREDESSGGAKKKAPPKKRRAVIESDDDDIEIDEDDDDDSDFNC

SEQ ID NO: 77 - DNA, 1863 bp, Drosophila melanogaster
  Name: alpha-Est1
  AE003671
  GI: 10727101
  Transcript: CT1044
attgttcggttctcattgcgcgattcagttgttcctcgtcgatcgcggcccgcggaagtgttcatttcactatcgtgccccgccggattgtgccgcccattctgacccttgagtcttctgctcacatagttagctgtgaatataattggagtcgcgagcggataaatggagatccgagtgggagtgggcgatctgctgaaaatgggcaccaagctcattggccacaagatcgtccagtatcgccttggcacaaagcagacgaaggtggtctgcaccagggatggccaggtgcgcggacatcgccgaaggacactctacgacgaggagatgtacttcgccttcgagggaatcccctttgcacagccgccggtgggggagctgcgcttccgagccccccagccaccacatccctggttgggggtgcgggattgcacctatccgcgggccaagccgatgcaaaagcacttcgtgctcagcatcgtcgaaggcagcgaggattgcctgtacctgaacgtatattccaagcgcctgagatcggacaagccgctgcccgtgatcgtgtggatctatggcggtggattccagttcggcgaggctggtcgagatttctacagtccagactactttatgcagcaagacgtagtggttgtcacattcaattatagggtgggcgcattgggcttcctcagcctcgcggatcgcgacttggatgtgcccggaaatgctggtctcaaggaccaagtgatggcccttcgctggatcagtcagaacatagcccaattcaatggagatccccaaaatataaccgtgatgggcgagagtgcgggagcagcctccgttcacgcgttgatgaccaccgagcaaacccgagggctgttccacaaggccatcatgcaatcgggatccatgttctgcgagtgggccaatgagccaagtggcaggtgggcataccgactggcctgccaattgggatactcgggcagtgagaacgagaaggaagtgtttcgataccttcagaaagcacccgcctccgaaatggccgcacagggtattactcttgtctcccaagaggaacggcggcagtacgtcctgtttccctttactcccgttgtggaaccatatatcaccagggattgcgttttgccccgttgccacagggagatgctgccggaagcttggggtaatgacctgccgctgatcctgggcggcaactcctttgaaggtctgttctcctaccagagtaccctgcacgacgaggaacacatgctgagtgcttttgaggtcctaattcctcgggagatcagggagaagagtacccagtcgcatcttaaggatctgctacgtcaatttaaggtggataacttcgatgatgcgactcgagggcgaatggagttcaatgagtgcctgcacatactgtccgttaaacacttttggcatggcattcatcgcactgtattggcccggctcagccacgcccccgcaacgcccacctacctgtaccgcttcgatgtggactcgccccatttcaatcacttccggcaggtgatgtgcggaaaacacgttcgcggagttagtcatgccgacgatctctcctaccttttctatcacattttggccaacaaggtggataagtcctcgatggagtaccaaaccatacagagactggtgggcatgtgggtggcattcgcccgaaacgacaatcccaattgtccacagatcggcccgaccacatgggaggcactagatgagaaaggtccgcagatgtgtctcaatattggaaaacaactggagttcattgtgctgccggagtcgaaacagaatcggatttgggatagactatacgataaaaacgacttgttttag

SEQ ID NO: 78 - protein, 540 aa, Drosophila melanogaster
  AAG22202
  GI:10727102
MRDCAIYSVIKTKSGPVRGVKRNTIWGGSYFSFEKIPFAKPPVGDLRFKAPEAVEPWDQELDCTSPADKPLQTHMFFRKYAGSEDCLYLNVYVKDLQPDKLRPVMVWIYGGGYQVGEASRDMYSPDFFMSKDVVIVTVAYRLGALGFLSLDDPQLNVPGNAGLKDQIMALRWVQQNIEAFGGDSNNITLFGESAGGASTHFLALSPQTEGLIHKAIVMSGSVLCPWTQPPRNNWAYRLAQKLGYTGDNKDKAIFEFLRSMSGGEIVKATATVLSNDEKHHRILFAFGPVVEPYTTEHTVVAKQPHELMQNSWSHRIPMMFGGTSFEGLLFYPEVSRRPATLDEVGNCKNLLPSDLGLNLDPKLRENYGLQLKKAYFGDEPCNQANMMKFLELCSYREFWHPIYRAALNRVRQSSAPTYLYRFDHDSKLCNAIRIVLCGHQMRGVCHGDDLCYIFHSMLSHQSAPDSPEHKVITGMVDVWTSFAAHGDPNCESIKSLKFAPIENVTNFKCLNIGDQFEVMALPELQKIEPVWNSFYAPNKL

SEQ ID NO: 79 - DNA, 2146 bp, Drosophila melanogaster
  Name: Nrk
  AE003819
  GI: 10727582
  Transcript: CT13296
atggtgctgaaatggggggccaatttggctgtcctggggctgtgcgtgtttctctttgccagcgccacgcacgcgaactccctgaacgccatcgaggagcccgtcacccggcgacaccaccagcggcatcacgagcgcgagcgggaggagaacggctactgcgccccgtacagcggcaaggtgtgcaaggaatacctcaccggccaggtgtggtacagtctggaggatcccactggcgggtggaagaacgagcaggtgaccacggcgctctgggacgagcttatctccgatcttacgggtctgtgtcgcgaagcagccgagaaaatgctctgcgcctatgcgtttcccaactgccacatggagggcggtcgagcggtgaaggctcctctctgcttcgaggattgccaggccacgcatctccagttctgctacaacgactgggtgctcatcgaggagaagaaggagcgaaatatgttcatcaagagccgcggccacttccggctacccaactgctcctccttgccgcactacaacgcttccatgcggcgacccaactgctcctacatcggtctcaccgaactcaaggagtccgaagtgagctacgattgccgcaatggaaacggacgcttctacatgggcacaatgaacgtgtccaagtcgggcattccctgccagcgctgggacactcagtacccgcacaagcacttccagccaccactggtcttccatcagctcctggagggcgaaaactactgccggaatgctggcggtgaggagccgcatccctggtgctacactgtggatgaatcagtgcgctggcagcactgcgatatacccatgtgtccggattatgtggaccccaatgctgtcgatttgaacacgcccatcaagatggagaagttcttcacgccatcgatgatctttctcttggctggaataggtttcgtggccattgtgaccctgcacttgatgatattgctagtctataagttgtccaagcacaaggattactctcagcctgcgggagcagccactgccgaatgcagtgtttccatgcgtggaggaggagattgtggcggcaatctgaacaccagtagagaaaccctcggaggcaatggaaacacgaacaccttggcaaaatggggcaccatcaggagcacggccacaatacacagcaattgcgtggcccttactacggtgaccaatgtgtctgatgcgaagggcacgaaaccgaatgcacgcctggagaagttggagtacccacgcggggatatagtgtatgtgagatcattgggtcaaggagccttcggtcgcgtcttccaggccagggctcctggacttgttcccgatcaggaagatctactagtcgctgttaagatgctaaaggacgacgccagcgaccagatgcagatggatttcgagcgcgaggcctgtttgctggccgagttcgatcatcccaatatcgtgaggctgctgggggtgtgcgccttgggcagacccatgtgcctgctcttcgagtacatggctcctggcgatctaagcgagttcttgcgcgcctgctccccatatgccacacaccaggcgccgacacaggatcgtctgcagttgaacgagctacatctgctgcagatggcggccaacattgcagcgggcatgctgtatctttcggagagaaaattcgtccaccgggatttggccaccaggaattgcctgatcaacgagcacatggcggtaaagatcgccgactttgggctctcgcacaagatctatttgcaggactattacaaaggcgatgagaacgacttcatcccgatccgctggatgccacttgagagcatactgtacaacaagttctcgcttgagtcggatgtgtgggcatacggcatctgtctgtgggaggtcttctccttcgccttgcagccctactttgggttaacccacgaggaggtgatcaaatacatcaaggagggcaacgtactcggctgtccggacaacacgccgctctccgtctacgcgctgatgcgtcgctgctggaaccgcaagcccagtgagcgacctggcttcgccgagatcaaccactgcatccagcacagcatcgccgagagcgagtgcaaggcaatgctctaggggattgccggagaagtga

SEQ ID NO: 80 - protein, 724 aa, Drosophila melanogaster
  AAF58420
  GI:7303361
MAAGQWVGVVERVLRGMVLKWGANLAVLGLCVFLFASATHANSLNAIEEPVTRRHHQRHHEREREENGYCAPYSGKVCKEYLTGQVWYSLEDPTGGWKNEQVTTALWDELISDLTGLCREAAEKMLCAYAFPNCHMEGGRAVKAPLCFEDCQATHLQFCYNDWVLIEEKKERNMFIKSRGHFRLPNCSSLPHYNASMRRPNCSYIGLTELKESEVSYDCRNGNGRFYMGTMNVSKSGIPCQRWDTQYPHKHFQPPLVFHQLLEGENYCRNAGGEEPHPWCYTVDESVRWQHCDIPMCPDYVDPNAVDLNTPIKMEKFFTPSMIFLLAGIGFVAIVTLHLMILLVYKLSKHKDYSQPAGAATAECSVSMRGGGDCGGNLNTSRETLGGNGNTNTLAKWGTIRSTATIHSNCVALTTVTNVSDAKGTKPNARLEKLEYPRGDIVYVRSLGQGAFGRVFQARAPGLVPDQEDLLVAVKMLKDDASDQMQMDFEREACLLAEFDHPNIVRLLGVCALGRPMCLLFEYMAPGDLSEFLRACSPYATHQAPTQDRLQLNELHLLQMAANIAAGMLYLSERKFVHRDLATRNCLINEHMAVKIADFGLSHKIYLQDYYKGDENDFIPIRWMPLESILYNKFSLESDVWAYGICLWEVFSFALQPYFGLTHEEVIKYIKEGNVLGCPDNTPLSVYALMRRCWNRKPSERPGFAEINHCIQHSIAESECKAML

SEQ ID NO: 81 - DNA, 4645 bp, Drosophila melanogaster
  Name: otk
  AE003823
  GI: 1072617
  Transcript: CT25769
cgcgtgcagttcagattgagtttgaggttcgattggattcgagatatccaagttccttttgcgctacgttttgtttagccgagtttgccccgaactaaaatcacccaccaaagccggttcgggatgcgatgatgccaaggatgcagctgatgcagccgggctcttgtatctttaagatacaaattaagttgatttgttgcgctcgcgttctcttgggtaattgaaccccacagttgggctccttgcgccctctgccgcgcggtcttcggtcttcggtcttcgagcatttcgttgcattttgtgtatctagatacctttgtcggtatccgtatccgtcgcttgtcaatctggtcgctgataaaaaagcaaacgcgaacgcagccacgaaacataaaccagccgtcaacggaaaataaaagtaaaaagcaacaaacagcaagtggcgtatcagttcgtgtgttctcggtgataaatgcatttcatgcgttccaactatgtaaatagcaatttaatttgagtgtccacagtaaacatcaaaaaaccgccctggactccagtcaccaccaccaacaacaccatccccggtggagcccagtgatcccattgaaaccccggtaaacccctgaaaagggcagtcgttgtcatcgtcgtcatcgtcgtcgtcgtcgtacgtctgtgccatccaaatattgaatatttacaaatgcgttgagtgcattttcgagtggccggcacttacagtgactatctggtggatgtgcgagtgtattcatcggattgccagcagcataaaacttcgttttcgatactgatccaatacgcgagtgcttatatattttttgtgtcgctaattgagaccaaaggtgtcgaagtgcggcggttatacatatacgcagatgactgctaggatgatctcaatatgcggcctggtcatggctttgatgatggcttccgttttggccagctcatcgcgtttccagcgagtgccccaaagtcagtccgtggtggaaaatgaatccgtgaaattcgagtgcgaatcgaccgactcctacagtgaactgcactacgactggttgcataatggtcatcggattgcgtatgacaagcgtgtccatcaaatcggttccaatttgcatatcgaggcggtgcggcgcacggaggatgttggcaactatgtttgcatcgcgacaaatttggccagcggcgccagggaggcgtctccgcccgccaaactgagcgtgatatatcttgaatcggccagtgttcagctgctgggcagcaatcgcaacgagctgctgctcaagtgccacgtggagggcgcctcaggagatttggaaccgctagagatcgaatggtatcgcaacagcgagaaacttagcacctggaagaacgtccagctggatcagcatcgcctgataatccgacagccgggaagcgaggacgatggcctgtaccgctgcaccgcctccaatgcggcgggtcgagtgatgagcaagcagggctatgtctaccagtccagtgtgaagtgcctgccccgacttcctaggcgcaagaacgaaaagatgatggagtcctgggacaaacagaccttcctgtgccgcggtaagcgcggtggagctgctggactagaggcactacccgccgctcccgaggatctgcgcattgtgcaaggacccattggtcagtcgattatcaaggagggtgagcccacggctttgacctgtctgtatgaactgcccgacgagctgaagaaccagcgcattcaactccgttggcgcaaagatggcaaacttttgcgtcaagtggaactgggtggctcggcgcccattccaggtcactccttcgattccggcaaggatgctctgttgcgtgaggacgcccgtctagtgctgcacaagcagaatggcaccctaagctttgccagcattattgccagtgatgcgggtcagtaccagtgtcagttgcagctagaagctcatgctccgattaactcatctcctggcatcttggaggtcatcgagcagctaaagtttgttcctcagcccacgtccaagaatttggagctggatgcagtggtggccaaggttcactgcaaggcgcagggcactccaacgccgcaggtgcaatgggttagggatggggaaaataccactttacccgaccatgtagaagtggatgccaatggaacactgattttcagaaacgttaactcggaacatcgcggcaactacacttgcttggccaccaacagccaaggacagataaatgccactgtggctataaatgtggtggtcactcccaaatttagtgtgcccccagtgggacccatcgagacttcggagcagggcaccgtggtgatgcattgccaggcgattggggaccccaagccgacaattcagtgggacaaggatctaaagtatctgagtgagaacaatacggaccgcgaaagatttaggttcctggagaacggcactctggagatacggaatgtccaggtggaggacgagggtagctacggctgcacaattggaaatagtgcaggactcaagcgagaggatgtccagttggtagtgaagacaaccggtgacggtttcgctccagaggaatccggaggtgatggcttcctggtcacccgagctgtactgatcaccatgacggtggccctggcctacatagtgctcgtggtgggcctgatgctgtggtgtcgctatcgccgtcaagccagaaaagcccgtttaaacgatctgagcacaaaggaagctggcggggatcagccggatgttgctggcaatggcaaaggctccgagcaggagccctgcctgtctaagcagcacaatggccacagcaaatccagatccaagtccagtggagatgcccagaaatccgatgacacagcctgcagccagcagtcgagggcctcaaagaaatcggcacatatttacgagcaactggctctgccaagatccgggctcagtgaactcatacaaattggacgcggcgagtttggggatgtgtttgtgggcaaacttaaggctaccttagtcacctcgccctcggacaaggatgcggatacggaaaagcagcacagcaacagtgaaaatggcagtggaggcagcggaagtggaagcaccacgctaagtactctaaatgagaagcgtcgctccaagacctccatggacgacattgaggagatcaaggaggaggagcaggatcagcacaatcaatcgggtctcgagcagctcgttctggtcaaagccctgaataaagtgaaggatgaacaggcctgccaggagtttcgacgacagttagatctgctgcgcgccatctcgcacaagggagtagtacgtctgtttggcctgtgtcgcgaaaaggatccgcactacatggtgctggagtacacggattggggcgatctcaagcagttcctgctggccaccgccggaaaagtgaacactgccaccgcgggcagctcctcaccgccgccactcaccaccagtcaggttttggccgtcgcctatcaaattgcccgaggaatggacgccatctacagagctcgcttcacccatagggatctggccactcgcaactgcgtaatttccagtgagtttatagtgaaggtatcctatccggctctctgcaaggacaagtatagccgcgagtaccacaaacaccgcaacacgctgctcccgatccgctggctggcgcccgagtgcatccaggaagacgagtacaccaccaagagcgacatctttgcctacggtgtggtggtgtgggagctcttcaaccaggccaccaagctgccccacgaggagctgaccaacgagcaggtggtgcagcgttcccaggcgggctccttggagtggtcagtggccgaggcgacgcccgatagcctgcgagagatattgctgtcctgttgggtgtccaatccgaaggagcgaccttcgttcagccaactgggagctgctctcagcaaggcgatgcagagtgccgagaagtgaggccagactgatggctcgatcatgccaaaaagtaattcgtagtattgtcttagtgtctgcacgcccgagttttgctatgcgctcagaaacctagtcttaaggatcgaaggataactgcgcctgtttaacatgcgcattgcgcacttggtggcacacagaatgaagttaagcagctactgtacaaacacaatgtatggaaatggggatatcttcgtgaatagtattgcgtggtgctgcatatttttaggtatgcagctaaaatgtacataataactgccacaaatatgcatttaaaccagttgaagcatttctaggattagatcatttcaaccttcgtcagcatttaataatcgacttctaagctaaattagtaaataaaataaaatataaatacacaagcatatgcatcacacaaaacaacgagcgatttcattgttttcaaacattgagaaactaagccaaattttaagtttagcattaaatataaataacacacaccacccacatattttatcacaagcctagttatacactttttaatgcgtaagaaacaaacagccgaaacaattttatgactagccatttaagctttgatgcatgtttacaaaacatttaaataaactcgaataaaataaatttaatcagaa

SEQ ID NO: 82 - protein, 1033 aa, Drosophila melanogaster
  AAF58596
  GI:7303541
MTARMISICGLVMALMMASVLASSSRFQRVPQSQSVVENESVKFECESTDSYSELHYDWLHNGHRIAYDKRVHQIGSNLHIEAVRRTEDVGNYVCIATNLASGAREASPPAKLSVIYLESASVQLLGSNRNELLLKCHVEGASGDLEPLEIEWYRNSEKLSTWKNVQLDQHRLIIRQPGSEDDGLYRCTASNAAGRVMSKQGYVYQSSVKCLPRLPRRKNEKMMESWDKQTFLCRGKRGGAAGLEALPAAPEDLRIVQGPIGQSIIKEGEPTALTCLYELPDELKNQRIQLRWRKDGKLLRQVELGGSAPIPGHSFDSGKDALLREDARLVLHKQNGTLSFASIIASDAGQYQCQLQLEAHAPINSSPGILEVIEQLKFVPQPTSKNLELDAVVAKVHCKAQGTPTPQVQWVRDGENTTLPDHVEVDANGTLIFRNVNSEHRGNYTCLATNSQGQINATVAINVVVTPKFSVPPVGPIETSEQGTVVMHCQAIGDPKPTIQWDKDLKYLSENNTDRERFRFLENGTLEIRNVQVEDEGSYGCTIGNSAGLKREDVQLVVKTTGDGFAPEESGGDGFLVTRAVLITMTVALAYIVLVVGLMLWCRYRRQARKARLNDLSTKEAGGDQPDVAGNGKGSEQEPCLSKQHNGHSKSRSKSSGDAQKSDDTACSQQSRASKKSAHIYEQLALPRSGLSELIQIGRGEFGDVFVGKLKATLVTSPSDKDADTEKQHSNSENGSGGSGSGSTTLSTLNEKRRSKTSMDDIEEIKEEEQDQHNQSGLEQLVLVKALNKVKDEQACQEFRRQLDLLRAISHKGVVRLFGLCREKDPHYMVLEYTDWGDLKQFLLATAGKVNTATAGSSSPPPLTTSQVLAVAYQIARGMDAIYRARFTHRDLATRNCVISSEFIVKVSYPALCKDKYSREYHKHRNTLLPIRWLAPECIQEDEYTTKSDIFAYGVVVWELFNQATKLPHEELTNEQVVQRSQAGSLEWSVAEATPDSLREILLSCWVSNPKERPSFSQLGAALSKAMQSAEK

SEQ ID NO: 83 - DNA, 1630 bp, Drosophila melanogaster
  Name: cad
  AE003668
  GI: 10799497
  Transcript: CT5072
ttgacgtcgccacgcacggaataacatttcaaattagtagattagccctgcaaaacaaaaatccatctcgtgagtgagtgctgaaaaatagcgtttcgaaatattatcgatatctcggtcgtatgttactgtgctcccaaaaaacacatcaccagccagtgataactgtaaagattgacaaagcaaaatatatccattataacccaaactgaaactccagaaaatgtgcaactaaaacatattggccatcaaagtgataagacttagagattaacgccggattattggacaccggaccgagcactgggactatcttcggagaaagcgcacctaatctaacctcaaaatggtttcgcactactacaacacactgccctacacacaaaagcacagtgccgccaatttggcctatgcctcagcggcgggccagccatggaactggacgcccaactaccaccacacgccgccgaaccaccagttcctgggcgatgtggactcctcgcatgccgcccaccacgcggccgctgcccaccagatgtactacaactcccatcacatgttccactcggcggcggcggcctctgccggggagtggcactcacccgcctcgagcacggcggataacttcgttcagaatgtgcccacgtcggcccaccagctgatgcagcagcaccaccatcatcacgcccatgcctccagcagttccgccagttccgggagcagcagtagcggtggtgcaccgggtgcgccccagctcaacgagaccaacagcagcatcggcgtcggaggagcaggcggtggcggtggtgttggcggggccaccgatggaggaccaggttccgcaccacccaaccatcagcagcacatcgccgaaggtctgccgtcgccaccgattaccgtttcgggctcggaaatctctagcccgggggcgccgacttctgcctcgtcgccgcatcatcacttggcacaccatttgagtgccgtcgccaacaacaacaacaacaacaacaacaacaacaatagcccatccacccataacaacaacaacaataacaattcggtgagcaacaacaacaggacatcgccatcgaagccgccatacttcgactggatgaagaagcccgcctatccagcacaaccacaaccaggcaaaacccgcaccaaggataagtaccgcgtggtgtacaccgacttccagcgcctggagctggagaaggagtactgcacctcccgctacatcaccatccggcggaagagcgagctcgcccagacgctgtcgctgtcggagcgccaggttaagatctggttccagaaccgccgcgccaaggagcgcaagcagaacaagaagggtagcgatccgaacgtgatgggcgtgggagtgcagcatgcggactacagccagctgctggacgccaaagcgaagctggagccgggcctgcacctgtcccactcgctggcccactcgatgaaccccatggcggcgatgaacattcccgccatgcgcctgcatccccacctggccgcccacagccactccttggcggcggtggcggcgcactcacaccagctgcagcagcagcacagtgcgcagatgtccgctgcggcggcagtgggcacgctctcgatgtga

SEQ ID NO: 84 - protein, 427 aa, Drosophila melanogaster
  AAF53923
  GI:7298711
MVSHYYNTLPYTQKHSAANLAYASAAGQPWNWTPNYHHTPPNHQFLGDVDSSHAAHHAAAAHQMYYNSHHMFHSAAAASAGEWHSPASSTADNFVQNVPTSAHQLMQQHHHHHAHASSSSASSGSSSSGGAPGAPQLNETNSSIGVGGAGGGGGVGGATDGGPGSAPPNHQQHIAEGLPSPPITVSGSEISSPGAPTSASSPHHHLAHHLSAVANNNNNNNNNNNSPSTHNNNNNNNSVSNNNRTSPSKPPYFDWMKKPAYPAQPQPGKTRTKDKYRVVYTDFQRLELEKEYCTSRYITIRRKSELAQTLSLSERQVKIWFQNRRAKERKQNKKGSDPNVMGVGVQHADYSQLLDAKAKLEPGLHLSHSLAHSMNPMAAMNIPAMRLHPHLAAHSHSLAAVAAHSHQLQQQHSAQMSAAAAVGTLSM

SEQ ID NO: 85 - DNA, 7005 bp, Drosophila melanogaster
  Name: rut
  AE003497
  GI: 10728252
  Transcript: CT26958
gttgcttctcttgcagcccctgatcttggcggccccaatccctttggcaggcatcggaaggagccgctcggcagcggcagctgcggcggcgccgcatggatcatgccgtgaaggcgacgcgcggccgcccgttgaatacgctgcgcttcgagaacgatgagctggaatgcctctaccagcggtatacgctcaagctgcagcgcttctcggtgctgggcgtggtggctctggtcttcgtcctctgcggcgtgatggcggccctttcgctgaccttcaacaacgcggccacctttcacaacatcttcaatgcgatcgtttgtggactgtttgccgtggtgctggtgctgctgcagtgttccgtgatcaaggaccaccacctgcccacattgtgctacggaatcctgctattcacggccagcatctgtgtggtgtcgatgcccacattgggcagcgtgttcccggtggacaccaaggaggtgatggccgagggcgtctggcagatcgtgttcgtggtcttcctcgcttacgccatgatgccgctgcagatttgggaggcggtggcctttggcatcgccctgccctcggtgcacataagtctaacggtctataagattttcacggatgcgctgcgctacctggagtataatcaactgattgcgaacattgtcatctttattggtgtaaatgtggccggtctcgtggtgaacatcatgatggagcgcgcacagcgtcgcacatttctcgatacacgcaactgcatcgcatcccgtctggagatccaggatgagaacgagaaactggaacgtctgttgctatcggtgctgccgcagcacgtggccatgcagatgaagaacgacatcctgtcgccggtggctgggcaatttcatcgcatctacattcagaagcacgagaatgtgagcatccttttcgcggacattgtcggattcacggtgctctcctcgcagtgtagtgcccaggagctggtccgcctgctcaacgagctctttggccgcttcgatcagctggcacacgataatcactgtttgcgtatcaagatcctgggcgactgttactattgtgtctccggattgccagaacctcgcaaggatcacgccaaatgcgccgtggaaatgggactcgatatgatagatgccattgccaccgtggtggaggccaccgacgtcatcctgaacatgcgcgtgggcatccacacgggccgtgtgctctgcggggtcttgggccttcgcaagtggcagttcgacgtgtggtcaaacgatgtgaccctggccaatcacatggagtccggcggggaaccgggtcgggtgcacgtaacccgcgccaccctggactccttgtccggcgaatacgaggtggaggctggccacggcgacgaacggtcctcgtatctgcgcgaccatggtgtggacacgttcttcatcgttccgccgccacatcgacgcaagccactgatgctcaacacactgggcgttcgctcggcgatcggcagtcgacggaagttgtcgttcagaaacgtgtccaatgtggtcatgcagctgctgcacacgatcaagttctcggaaccggtgccgttctccaatatagccaccggatcgttcccctcagcggccagcgccttgggtggcggagtttcagtcggcggtggtggaggaggaggaggaggaggcgtggcacggggtagcacctgcgaggcgaactctggaaacgttcaggtgtcggagaagggatcgcgcaaggtgatacgtctgcaaaagatcttgcatgcaacaccgccaccgcacggcatgggctatggcagcgtcgtcggcagcggcggcggtgtggacagcggtatttccggtggtggtggctgtgtttccggtggtattgccggtgggggcggtgttcaagtgaccgtaggcacaaatcccaactctacagcgagtacgattagtcgcattcataggcacaatcacaaaaacaataaatcccagtcgaaggtggcggacaaattcaagaggccattccggaagcggcactcggtggccgcccaccatcagccaacgaatcgggtgaatcgattcctttcccaggcgatcaatgcccggtcggtggactgcgacaaatcggagcatgtggatcgattgaccctgcgattccgacagagcgacatggaacgcgagtatcacaaggatttcgatctgggcttcactacggccatgggttgctccctgctgttgctcatcctcggtgcagcgctccaggtgactgctctgccgcgcactctcatcctgctgctgctctttctctttgccttcatttgggtgagcgccattctgatgctcctgctcgccgtgcgtctcaaatggatcatctgggatatttcggagagcttttcgctgcgcatggccatcacgattttcacggtcatactcatctattccgtgggacaagtgaatgtgtttacgtgcgtttcggatcatccatgctcgggcaatgggacgacctccttccagaacgactctcatcgcaagtgctcgctgccgcagtacgtgtccctatcggctgcctttgcctttctatctgtatcggtattcctgaggctgcccatcatattcaaatcgctcctagttctgggcatgggcaccatctatggccttttcatagagctatcgcatcagaatatctttgagtgctacgacaaccgggtcaacgcctcgattccacttcacttgatctcgctggcccgcattgccatcttcatgattgccattttggtgcatggacgcctggtggagggcactgcccggctggacttcctctggcagctgcaggcgtcgcaggagaagaaggagatggatgtgctacaggagtccaataagcgcattctacacaatttgctgcccgctcatgtggctgcacattttctcgatgcgcaatttcgcaacaacatggaactctaccaccagagctatgccaaagtgggcgtcatctttgcaagcgtaccgaacttcaacgagttttacacggaaatggatggctccgatcagggtcttgagtgcctccgtctgctcaacgagattattgcggactttgatgagctgctcaaggaggatcgtttccgcggcatcgacaagatcaagaccgttggtagcacttatatggctgtcgtgggactcatacccgagtacaaaatccagcctaacgatccgaactcagtgcggcgccacatgacagcgctcattgagtatgtcaaggccatgaggcactcactccaagagataaacagtcactcgtacaataacttcatgctgcgcgtgggcatcaacattggacccgttgtggcgggcgtaattggagctcgaaagccacaatatgacatttggggcaatacggtgaacgtggccagtcgcatggactccaccggagttcccggctactcgcaagtaactcaagaggtggtcgacagcctggtggggtcgcactttgaattccgctgtcgtggcaccattaaggtgaagggcaaaggcgacatggtcacatatttcttgtgtgacagcggcaacaaatcgctgaacggagaagtgcgcaacgccatgtccctgccacagagtctccatgcgccggattactatatgaaggtgtcgcagtttccggagaatcgcgtcaataccgacacctatagcaaaaaggagaatggacatctgtacgctggcaacggcgtcgaggagcagcagttgttgctgcagcatcagcacaaacagcacgatccgctaccgcttcctgctcctccgcctccggttcaccatcatttgcatcagcagcaacagcagcgtttgaacagcaagctgcaaaagcaaccgatcttcatggccaacggtggtctgcccaatatccgggagaatggcaatggtcacaatggagagcatcagcagcagcagcagcagcagcagcaacatcagcagcagcaacagcagcagcagcagcacggtggctttatggtggcaacgacgacaccgccggctgcagtggcggttcccctccagccccagcaccatcaactccagttccagcacccgcaccagcatccactcccgtcagcagtgtcggttccagtgcagcaccagatcctactccaccaccagctccagctccagcaccagcccgttccttcggtaatgttgcgcgagtttaatattattgagaatccgacttccggtggccggcatcagcagatggagcagctgccgccgcatcacggcagcctcgacctatcgggaatgggaatgggtgtgggggctggcgtgctcggcagcgactgcttcatgatgccacggcgagatcgcgaacgcacatatgtgccgcccttaaaccagcatggccatcatccaccgcatcacctccattcgaatctgaatctgaatcagagccagcacccgccatcgttcaccagcctgggctatggccaatgccgggagagcgagccgctattgcatgccagcagcgtcgcgccggtagccaagatcatgcccatgcagcatgcgccaaagtacgagccaccacgttacacttctccccacaccatgttgtcgcaacagcaccagcagcagcagcagcagcagcatcagcatcagcagccgcaatcgcaatctgcccaggatcagcagacacatcccgcccaggacccacatcctttgcagcggcagtacgccatgtattcgcagcagccgcagctgccgccgaagccagtgctgagaacgtacatgaagccgttgccgaagctgccgacggatctggaggagagccgcgacatgtcctcgacggatgatctgagctcacgaccacactcgccctcgatgagcagctcggatgagagctactcgaagaccacagagggcgaaggtgaaggcgatgaggactcgccgcgcatggtcaatggtggccacctgcatcatcgcaatggctaccacctgcccgccggtggtctggtcaacccattgcaatggctctacccctgcgacattcaggtggatcccacctctccggtcgtcgacatggcccacctgcatgactttgagctaagctccaccaccgagagccagggccatcacactaacagcaacacgacgagcaacacacaacacaagggcgacagctgcaacagcttcgactttcagaaggcagcagttggaacggcagcgggtgcggcaatcgcgaccaagtcgcccttcgagcgtgaactgcaacgtctgcttaacgaatcctcgcgagctcgttgcctggcgactgcgacaacgacggctggagccatctctaccacagatcagacggccagcaatggaagccgtgagttgagctactccctcagcaatgggaagctgagctctgcgaatggacatggcgttggaggatccggatccggatccggatcgggatcaggttcaggttcggcggtgggcaatggcagcggtggcagcggcagcagcaatggcaatctcagcggcggcagcggcagcaactcgaacagtggcaacaacaacagcagtcaccacaagacggagcagcagcagaatatggatcacgagcatctggccggtggcaaattgctgggcagtaatagcttcatgatcgccaaacatccggtgggcttggaagccatcaaggagataacgcgcaacaagaatccctcggagtccagccaaatgcaaacctcggacacggagtcctgcgagattctgcacgagaaccgcaaccagatgcatgtgctggccatgctggagatgcatacggccaaggagctgaatggcagccatgcgcatcacggtcagcatcaccagcagccacagaggacgcatcgccagcgaccgcgctccaaggagctgcagtacagccacgagagtctggacggactggatggagcggtgcagtcgcagtcgcagcagcgacaccaacgctatcatcaccaccatcaccaccaacagaggcagcagcaacagcagcgctacaaccatgtgcaggagcaggaggagcgtgacgacaccgaggacaacctggccgatgaggagtttgaggacgacgaagtgggtcgtgatgtgcgacagaagcgcctacaaaagtccgagctcaatcacaaacgatcggaggttgcaacagaggcaggcaatcaccacgacgacgaggtggaggaggaggacgacgatgacgacgaagaggaggaccaccggaatggcgggcgggaggcggcaccgctgactaacggcagcatgcgcggcctggaggccaatgtgataaacgacgagctgaagtatggagcaacccatctcaatcaccagtccatggactccaatccgttggagagccaatcggagtggtcggatgacgattgtcgtgaggaagcaacagggggagccgagtccacgggctacattacggatgagcccggactggagaacatctcgttgctgaacgaagctggtctcaccgatgccgagggcgctctctcggatgtcaactcgctgtataacgcgccggacgtggacgacacttcggtgtccagccgggccagctcccgcctgcttagcctggactcgctgagcggcctctacgactgcgatctggactccaagcacgagctggccatcgtcaatgcctcgcacaagatctccagtaaatttgggcagcctctatcaccggcacagcagcaacatcaacaacagcagcaacagcaacagcagcaacagcagcaacaccaccaacagcagctgcagcagaatccgcagcacactcaagcccaatcgcatttggctccggttcagtttcagtccgccgaggagttgagagagtaaagattgaaagttcgtgtgaagcaggtggagcgttaaacactcaaacgttgttattgctatatgcaaatggtgtctaataatttacaataaaccaacctaaactatagtaaactaaatctagaataggtgacagatatgcatatatcgaaatatatatatatat

SEQ ID NO: 86 - protein, 2248 aa, Drosophila melanogaster
  AAF48388
  GI:7293001
MDHAVKATRGRPLNTLRFENDELECLYQRYTLKLQRFSVLGVVALVFVLCGVMAALSLTFNNAATFHNIFNAIVCGLFAVVLVLLQCSVIKDHHLPTLCYGILLFTASICVVSMPTLGSVFPVDTKEVMAEGVWQIVFVVFLAYAMMPLQIWEAVAFGIALPSVHISLTVYKIFTDALRYLEYNQLIANIVIFIGVNVAGLVVNIMMERAQRRTFLDTRNCIASRLEIQDENEKLERLLLSVLPQHVAMQMKNDILSPVAGQFHRIYIQKHENVSILFADIVGFTVLSSQCSAQELVRLLNELFGRFDQLAHDNHCLRIKILGDCYYCVSGLPEPRKDHAKCAVEMGLDMIDAIATVVEATDVILNMRVGIHTGRVLCGVLGLRKWQFDVWSNDVTLANHMESGGEPGRVHVTRATLDSLSGEYEVEAGHGDERSSYLRDHGVDTFFIVPPPHRRKPLMLNTLGVRSAIGSRRKLSFRNVSNVVMQLLHTIKFSEPVPFSNIATGSFPSAASALGGGVSVGGGGGGGGGGVARGSTCEANSGNVQVSEKGSRKVIRLQKILHATPPPHGMGYGSVVGSGGGVDSGISGGGGCVSGGIAGGGGVQVTVGTNPNSTASTISRIHRHNHKNNKSQSKVADKFKRPFRKRHSVAAHHQPTNRVNRFLSQAINARSVDCDKSEHVDRLTLRFRQSDMEREYHKDFDLGFTTAMGCSLLLLILGAALQVTALPRTLILLLLFLFAFIWVSAILMLLLAVRLKWIIWDISESFSLRMAITIFTVILIYSVGQVNVFTCVSDHPCSGNGTTSFQNDSHRKCSLPQYVSLSAAFAFLSVSVFLRLPIIFKSLLVLGMGTIYGLFIELSHQNIFECYDNRVNASIPLHLISLARIAIFMIAILVHGRLVEGTARLDFLWQLQASQEKKEMDVLQESNKRILHNLLPAHVAAHFLDAQFRNNMELYHQSYAKVGVIFASVPNFNEFYTEMDGSDQGLECLRLLNEIIADFDELLKEDRFRGIDKIKTVGSTYMAVVGLIPEYKIQPNDPNSVRRHMTALIEYVKAMRHSLQEINSHSYNNFMLRVGINIGPVVAGVIGARKPQYDIWGNTVNVASRMDSTGVPGYSQVTQEVVDSLVGSHFEFRCRGTIKVKGKGDMVTYFLCDSGNKSLNGEVRNAMSLPQSLHAPDYYMKVSQFPENRVNTDTYSKKENGHLYAGNGVEEQQLLLQHQHKQHDPLPLPAPPPPVHHHLHQQQQQRLNSKLQKQPIFMANGGLPNIRENGNGHNGEHQQQQQQQQQHQQQQQQQQQHGGFMVATTTPPAAVAVPLQPQHHQLQFQHPHQHPLPSAVSVPVQHQILLHHQLQLQHQPVPSVMLREFNIIENPTSGGRHQQMEQLPPHHGSLDLSGMGMGVGAGVLGSDCFMMPRRDRERTYVPPLNQHGHHPPHHLHSNLNLNQSQHPPSFTSLGYGQCRESEPLLHASSVAPVAKIMPMQHAPKYEPPRYTSPHTMLSQQHQQQQQQQHQHQQPQSQSAQDQQTHPAQDPHPLQRQYAMYSQQPQLPPKPVLRTYMKPLPKLPTDLEESRDMSSTDDLSSRPHSPSMSSSDESYSKTTEGEGEGDEDSPRMVNGGHLHHRNGYHLPAGGLVNPLQWLYPCDIQVDPTSPVVDMAHLHDFELSSTTESQGHHTNSNTTSNTQHKGDSCNSFDFQKAAVGTAAGAAIATKSPFERELQRLLNESSRARCLATATTTAGAISTTDQTASNGSRELSYSLSNGKLSSANGHGVGGSGSGSGSGSGSGSAVGNGSGGSGSSNGNLSGGSGSNSNSGNNNSSHHKTEQQQNMDHEHLAGGKLLGSNSFMIAKHPVGLEAIKEITRNKNPSESSQMQTSDTESCEILHENRNQMHVLAMLEMHTAKELNGSHAHHGQHHQQPQRTHRQRPRSKELQYSHESLDGLDGAVQSQSQQRHQRYHHHHHHQQRQQQQQRYNHVQEQEERDDTEDNLADEEFEDDEVGRDVRQKRLQKSELNHKRSEVATEAGNHHDDEVEEEDDDDDEEEDHRNGGREAAPLTNGSMRGLEANVINDELKYGATHLNHQSMDSNPLESQSEWSDDDCREEATGGAESTGYITDEPGLENISLLNEAGLTDAEGALSDVNSLYNAPDVDDTSVSSRASSRLLSLDSLSGLYDCDLDSKHELAIVNASHKISSKFGQPLSPAQQQHQQQQQQQQQQQQQHHQQQLQQNPQHTQAQSHLAPVQFQSAEELRE

SEQ ID NO: 87 - DNA, 5769 bp, Drosophila melanogaster
  Name: CG8002
  AE003511
  GI: 10728334
  Transcript: CT24042
atgtgtgcacctcctcttgacctttcgcaggatccggaggacttctaccgcctggatccacagcgatcggccgccgaaaatgcattcgaaatatactcgatgctctgtttggaggagacgcgggacacgaagcgcctgtttctgctcaacgcgctggcctcgctctgtttgggggcccgaaagggctcccaccacagcaatatacgcttcaccaccgaggagctgctctactgccttagtgcctcactggtgcacaccttcacccaagtgcgagcggcggcactgcgaacgatccggtatgccattagcacgcccaatgacatcaagacgttcaatgcactgcagctgcagcacctgctctgccgctccatcgatctaatgctgaagaacgacgacgagcgcgtccaggcactgaagctggtccgcaagatgctggccatcgcgccggaggacatcagtccggcggtggtgcgctgcctggtctcgctggcggatagcggcatcgaggagaacgacaatctgttgcgtgcctgcctggccaccctggcagagttcgctgtgctcaatccggcgctgctgatcgtctgcggcggcgtcacctccataacccgcaatgtgctagagtgccacaatccccgcatcgctgagagcctgtgcggcgtgcttctgtacctgctcgagtggccgcaaacgaggaacatctgcggtgtgcggctggactgcctggcagctccttattgcgatttcacctaccggcagagtatcgtcgataagaacaaggatgcgcgcgaacttcgctacaccagctgtcggctggcactgctgtctgtgctgcgcagctggacgggcaccctcgaattctgtgatcctagcaaaccctcaggcctgaaagcaatagtcgacgctctgtatttgaaccagatcgaagtcagaaaagcaatattggatttgctgtacgagctgctcacgctgccgcagccaacctggacggatgactatgcggtggcgttgcaggctgtggatccgtcggacttccaggacacgtggctgctgagcaatggtttcgtgtccgccgaagggcgctccattttgccaacgctggcggcgcgtgcaccgagcgtagtagagcagcacctggcgctgatgctgtactgtttcctcgagactggactgctcaatgcgctcgtcgaggttgtggtgagcagcgatcagttcgtctcggtacaggctacggtgctgattggcaagatcctgcagctaatgcacacccacctgcccccggatatttgctgtacgagtccggcactgcccacgctggtgagtcatgccacattggggaaccagcaggccaatgcagcggtggccgctctgcaaaactaccagaagttgctgcgccagcggccggcgtcgcgcagcttattcctagacagcattatccagggcggtgctctcatccagacgcgactgtttcgtcggcacctcaacgtgcaggagcaagcgggtcctgtgctacagttgcaggaaacggcggaggcggcggcatttgcggtaccgcctgtcactcagtttcgcggcaccctcgatcgttctcggctggattctgtctcctccagcgacgagtccaactcacaggcttcgacctcgtcgaggtccagttttcgactgaagcgtaagttccttccgcaagccttatatgataacttccgagccttcaatcggctgctgacagactcccgtgtgctgagccaagcggacgcgcatctttgggactgggatgttattaccaccatactgaagtcgaatttaatccgcaaactggactacacccaaggaaagttcctgaagcgactcgtggacttctacaagccgcgcaataatcggttctctcaccaggatttggtgcctggacagaggctgcctacatatgtcagtgccggattggatttaattgacgtcctcctgtccagcaatgagcttgaatgtatgcgctttataaccgactacttttcggacatcagccaacagctggcggccgtcaccacatcgaatcgtgcacacgactgtctatttagtccacagcatatgaataacacgatgtgtcagcagtatttcctctacatcggacgcatgtgccgaaccgtaaaaggcatcgaagtactcaaaaataccaccgtatttgaatacttgatcaatttggtgcgggtgacggaccacgtctgctatgtgaagctaattgtgtccggcctgaactacagctacgagaagctaccacgtcaggtgctggaaaaggcgcttacgtcggcgaagacacgcggacgtctgtactccacccagttcatggcagtgctgctgcgtgcccgtctgcctcactttgaggtatggggcattccattgattatcaaccagacgcgggattcggaccgtagcgtggggctggcagccatggatgtactggaggaggcctgccacgacaagtactacctggaggagattgtcagtcggtggcccaatctaacgcatcgtggtgatgcaggacggctgctgatggcccgctattattcactgccccgcggcctgaacagtacgatggcacgaatcgaggatgagatccgctactggcggaatgggtacaacaagcgctacgtgctcctcgtggaagccgacacccactcaagcctgacgctgcacatccgcaatgaggatggctactactcgcgtcgcaattgcaaccagagaccacagactgtaccaccaaacgttgcacctcatctgtacgggcaaatggcacagactggccagggtatgacagctctgcggaagcacggagacctgccgcagctattggaactgctcagacgcgccaaatgcacggacgatgccgagtgccttgaactgaaggccgccatttgggcactggcccacgcctcaacccactccaatggaattgaatactttgtcgaactgaatgccagactatacgagaagcttattgttctggtgaccaaatgcgaggtatattcggtgagggccacctgttttagtgccttaggtcttatcgcaggcacacaggcaggtgccaatatcctttttaagttgaactggctgagcgtgcgacatgacaagaacacaatgtggcccgtgcatcagccggaggattggatgtccagccagtacacaccggtgcgacattactacgaggacgtgccggcggacaatatgaccatgatggatgactatatagaaagattctacgaaacgggctcagacttttggcacatgctcgccgatcagactgatgcgagtggtggtggtgggggtgtagccggcacagtcgtcggtatgcatcctatagtgcaggatccaaatgcaacgattacgaccacggacagtgttcgcaccacgaccgatgatgtgcaccccagaatgttggttggagtggctgccaaatcaaagactttgccagaaggtagcaatctgcgtcagggcaagcaccaacgctcgctctccgaatcgaagaccacggatgtgatcagcttgttgggcagtggtgtaggtacgatgtcgggagctgttctctacccaacgccgtatcagcatcgaatacgctacaactcgtgcacggattcaaacacttccggcgttagcagctgcgaatcggtgaccggacgcactgcagctgcatatgccgccgcagccaatgagttacagcaattccctttgagtcctattccaagcatgtccaatctgctcgagagcgatgagctgtttcgtcgaaatcagctagccaccagtatgctgccctccaccctcagtcctatggcgatgaagggctatgtccagctacgctccctgcgcaagcacagccgacccgtattctccgaatcttcggcggaattctacgactttgcggaaatactggacacaccagaggttcagatgcgcaagctcgactggacgcattcccaccgtcggcttaaggtacgcagcttggaccgccagctaagtgatgtttatagacgcctctccgcggacgagttgaatgtgcttctgcccacgcttaatgctcccaagttcctgcctcctaatgatttgaaagggccatgctatgcgggtatctgcttgcctaagaacgttctggacctgtttccgacgcgtaacctcagtcgaacgtacgtttcgcgggatatccaggaccaagatatagtgggcataaatctgctgaacaccatgctacggccacagtgtctcaatgactcactcaccaatgagggcggcgacgagtcatcggttatatcatcgctgtcggacgtctcgtctgcaagtcggcgacaaacacgacaattgcagcaaggcgccaagcactcgcgaagtctgtgtctccattgtgcccgctccccgcgacagcagcgtaatgacagcggcagccatagtaatggtggaggaggcgcatccctcgctccctgcgagctgtacagcagtgcagcagcagctctggtggcagccggcatccaggctggaccagttttggctaaaaagagtggctcatctgcccaaggagcttcagcggcacttggcgccgacatcagcttccattccccagagagcatgctgagcgaggatagcctgccggacaggcttacggcctccattctgtacaacgtgcagcgtctggccaatcccgttagtgccaagcagtcgaaaatggctctgttggagcttaagcagaaacacccgcacgcctttcaggatatttgcctttattcggaggcctgcaaaacgataggccggagtagctatcggatgatagcccgccgcttcctgcaggagctctttctggaccttaattttgactcgttctacgtggagcctcagctcataatcggggcacgtaagttttccgctgaggaaaaagcagaggccacggcccccacggcaatgcaggccatgccgtttaagcaaacgattctcaagcctaaaccggcggcccaactggctagcgtttatgagactagttgggagaacctgctgatggaccagtcgccacggataaacaagtcatcgcctgccgatcaaccggccaatgctcaaacgaaagcaaaggcccggaaccagctgcacattgacgatacggagagttcgttgtccagtaccgatggcgaaaatgattccggtgaggatgtttgcgacggcagtggagccggcacccaggccagctcggtgaccaccgctcatacagccctgcccacaggaaacagcaatcgtagcagcattggcacatgcacagcaagccagctggtgccaggtgcggcaacttcaaactccgctggtgctgggacaagcgcatctgataatgctagtacaagtctaaagaatgaaaaccggcaattcacacgcggacgattctatacgctggagctcgatttgagctgcaccaagaacaagtttcccatcaagaatcgcagccagcgaacaccaacgcctccaccaatcgaaagtttaatcgagtccaagcccacggttcagacagatgtgaatacaagtgcgctgccaattatgcagcggaccggtggcagcaatgactcctcgtcagccctaagatattccactgtgaccaagagcttgtcggcatcgatggccaggccggtgggcagcctgtactgcgagaagcgcttgcagagctccaaatcggaagcggtcctcgatgaggtggcgaaggcgagaagagcatccggtggtgtgggactgacaactgtgcgtgacaactcctag

SEQ ID NO: 88 - protein, 1936 aa, Drosophila melanogaster
  AAF48942
  GI:7293569
MASQHSSWRFGKRSKLQLRIKVSQDPEDFYRLDPQRSAAENAFEIYSMLCLEETRDTKRLFLLNALASLCLGARKGSHHSNIRFTTEELLYCLSASLVHTFTQVRAAALRTIRYAISTPNDIKTFNALQLQHLLCRSIDLMLKNDDERVQALKLVRKMLAIAPEDISPAVVRCLVSLADSGIEENDNLLRACLATLAEFAVLNPALLIVCGGVTSITRNVLECHNPRIAESLCGVLLYLLEWPQTRNICGVRLDCLAAPYCDFTYRQSIVDKNKDARELRYTSCRLALLSVLRSWTGTLEFCDPSKPSGLKAIVDALYLNQIEVRKAILDLLYELLTLPQPTWTDDYAVALQAVDPSDFQDTWLLSNGFVSAEGRSILPTLAARAPSVVEQHLALMLYCFLETGLLNALVEVVVSSDQFVSVQATVLIGKILQLMHTHLPPDICCTSPALPTLVSHATLGNQQANAAVAALQNYQKLLRQRPASRSLFLDSIIQGGALIQTRLFRRHLNVQEQAGPVLQLQETAEAAAFAVPPVTQFRGTLDRSRLDSVSSSDESNSQASTSSRSSFRLKRKFLPQALYDNFRAFNRLLTDSRVLSQADAHLWDWDVITTILKSNLIRKLDYTQGKFLKRLVDFYKPRNNRFSHQDLVPGQRLPTYVSAGLDLIDVLLSSNELECMRFITDYFSDISQQLAAVTTSNRAHDCLFSPQHMNNTMCQQYFLYIGRMCRTVKGIEVLKNTTVFEYLINLVRVTDHVCYVKLIVSGLNYSYEKLPRQVLEKALTSAKTRGRLYSTQFMAVLLRARLPHFEVWGIPLIINQTRDSDRSVGLAAMDVLEEACHDKYYLEEIVSRWPNLTHRGDAGRLLMARYYSLPRGLNSTMARIEDEIRYWRNGYNKRYVLLVEADTHSSLTLHIRNEDGYYSRRNCNQRPQTVPPNVAPHLYGQMAQTGQGMTALRKHGDLPQLLELLRRAKCTDDAECLELKAAIWALAHASTHSNGIEYFVELNARLYEKLIVLVTKCEVYSVRATCFSALGLIAGTQAGANILFKLNWLSVRHDKNTMWPVHQPEDWMSSQYTPVRHYYEDVPADNMTMMDDYIERFYETGSDFWHMLADQTDASGGGGGVAGTVVGMHPIVQDPNATITTTDSVRTTTDDVHPRMLVGVAAKSKTLPEGSNLRQGKHQRSLSESKTTDVISLLGSGVGTMSGAVLYPTPYQHRIRYNSCTDSNTSGVSSCESVTGRTAAAYAAAANELQQFPLSPIPSMSNLLESDELFRRNQLATSMLPSTLSPMAMKGYVQLRSLRKHSRPVFSESSAEFYDFAEILDTPEVQMRKLDWTHSHRRLKVRSLDRQLSDVYRRLSADELNVLLPTLNAPKFLPPNDLKGPCYAGICLPKNVLDLFPTRNLSRTYVSRDIQDQDIVGINLLNTMLRPQCLNDSLTNEGGDESSVISSLSDVSSASRRQTRQLQQGAKHSRSLCLHCARSPRQQRNDSGSHSNGGGGASLAPCELYSSAAAALVAAGIQAGPVLAKKSGSSAQGASAALGADISFHSPESMLSEDSLPDRLTASILYNVQRLANPVSAKQSKMALLELKQKHPHAFQDICLYSEACKTIGRSSYRMIARRFLQELFLDLNFDSFYVEPQLIIGARKFSAEEKAEATAPTAMQAMPFKQTILKPKPAAQLASVYETSWENLLMDQSPRINKSSPADQPANAQTKAKARNQLHIDDTESSLSSTDGENDSGEDVCDGSGAGTQASSVTTAHTALPTGNSNRSSIGTCTASQLVPGAATSNSAGAGTSASDNASTSLKNENRQFTRGRFYTLELDLSCTKNKFPIKNRSQRTPTPPPIESLIESKPTVQTDVNTSALPIMQRTGGSNDSSSALRYSTVTKSLSASMARPVGSLYCEKRLQSSKSEAVLDEVAKARRASGGVGLTTVRDNS

SEQ ID NO: 89 - DNA, 984 bp, Drosophila melanogaster
  Name: CG10335
  AE003542
  GI: 10727968
  Transcript: CT29022
atggagcggaaactgcacagtggaatgcaccatgccacgctgcggcagctgcaggagtcgggctgcgagatagcgccgcacaatctcatgtatccggtgttcatcgtgagcaacgacgacgatgtccagccaattgccagcatgccaggaatctcgagattcggactgaatcgcctgaaggagcacctggaaccgctggtggccaagggactgtcgtcggtgctgctctttggcgttgtggacccggacatgaaggatgagcaggcctccaatgcggattcagcaaagaatccagtcgttctcgcactgccgaagctccgggaatggtttccggatctgctgatagcctgtgatgtgtgcatctgcccgtactcctcgcacggtcactgcggcctgctgggcgaaacgggtctggagaacggacccagcataaagcggatagccgagatcgccgtggcttatgccaaagctggagcacacattgtggctccatcggacatgatggacaaccgggtgaaggccattaagcaggccctcatcgatgcccagatgaacagtgtatccctgctggcgtactccgccaagttcacatccaatttctatggacccttccgggaggcagcacaatctgcaccgaaattcggtgaccggaggtgctatcaactgcccagtggctccagaagcttagcaatgagagccattcaacgtgatgtcgccgagggagccgacatgctgatggtgaaaccgggaatgccctatctggatatcctacgatccacaaaggattcctatccgtatcacacgctgtacgtctaccaggtttccggggagttcgctatgctgtatcatgccgccaaggcgggagcctttgacctcaaggatgccgtgctggaggccatgaagggctttcgacgagctggtgccgattgcatcatcacctactacacaccctttctgctggacattatcggaaaggtcaagtaa

SEQ ID NO: 90 - protein, 327 aa, Drosophila melanogaster
  AAF49936
  GI:7294597
MERKLHSGMHHATLRQLQESGCEIAPHNLMYPVFIVSNDDDVQPIASMPGISRFGLNRLKEHLEPLVAKGLSSVLLFGVVDPDMKDEQASNADSAKNPVVLALPKLREWFPDLLIACDVCICPYSSHGHCGLLGETGLENGPSIKRIAEIAVAYAKAGAHIVAPSDMMDNRVKAIKQALIDAQMNSVSLLAYSAKFTSNFYGPFREAAQSAPKFGDRRCYQLPSGSRSLAMRAIQRDVAEGADMLMVKPGMPYLDILRSTKDSYPYHTLYVYQVSGEFAMLYHAAKAGAFDLKDAVLEAMKGFRRAGADCIITYYTPFLLDIIGKVK

SEQ ID NO: 91 - DNA, 2065 bp, Drosophila melanogaster
  Name: CG8070
  AE003834
  GI: 10727693
  Transcript: CT8068
accacacgtgcgtttactttgcgaaccaaacagaacgtggttgaaaataatcgtagtttttatactgttataacggctcaccatggtgcggcccaacaacaaccagctgccggagaaccttccgcagttgcagaacctcatcaagcgggatccggagtcgtatagcgatgagttccacatccagtaccaacactttcttagcttgctggaagtttttgcgctgaatcccagcgaagaaaacaaatccctggatgacatcgtcatgtttgtcgcccaggtggctcagtgctatccggccgtctgcgaggagttcccaaagcgtctttccgatttgctgaagaactatgccaccgttctggacccggctatgcgtaactgctttgtgaaagctctaatcctgctgagaaacaagaacctagtgcccgcgctggacatactggaactgttctttcagttgctgcggtgtccggacaagaatctgcgcacctttctgcaaacgcacattgtgacggacatcaagaatatgaatgccaagcacaaggacatgaagctcaattcgagcctgcaggcattcatgtactccatgctgaaggatgccaatccgaaggcagccaagatgtccgctgatatcatgatcgagctgtacaagaaaaacatatggaatgattctaagacggtgaatgtcatagccactgtggggtgcttctctaaggtaacaaaagtactggtcacctcgctcaagttcttcctcggccacgacgaagaggatgaagaggaggacactgacagcgagaacgaggtggaccttaagggtgctctgatggccaatcgagtcaataagaaaaccaagaagcggaccaagcaactggcgcagatcaaaaagcaagcggtgaaggcccagaaaaagaaaaagaacgctccagcctttaacttctcaggcattcacctggtgcacaatccgcagggaatggccgaagggctctttaagcagctgcaggccaccaacgagcgatttgaggtgaagctaatgcatttggacgttatttcccggctgatcggcatccacgacctcttccttttcggtttctatccgtacataacacgctttctgcaaccccaccaacgccaggtgacacgtgtgctccagtttgccgcccaagcgtcccacgaactggttcccggagacatcatcgagcctatcctaaagacgatcgccaacaacttcattactgaacgcaactccagcgatgtgatggccataggtctgaatgcgacgcgtgagatttgcatgcgatgtcccctggccatgggcgaggatttgctgcaggacctggcaatgtacaaaacgtacaaggagaagtcggtgatgatggcggcacggtcgctaatcacactctacagggaacagctgcctgccctgttgcacaaaaaggaccgaggcaggcagacagaggcccaggccgaacgaaaggttcgagcctacggagagcgcgaagtccacgacactgtcttgggtgcagaggctctgctcaaggactctaagactattgacatagagagcgaagacgatacggactcaaacgatggcgtggaaagtggcgaagagtccgcaaaggccaagaaggaaaagaaagatatgaggatccttaaccaaaaggaggctgcacaggaactggctcttactcgcatattcacggacgaagatttcaagcgcatcaacgcggctaatcttaagaagaccgtaaccagtgcccgcaagagaccacttgaacaggatcgcgccgagttcgtcaagctgaacagcatcgagatgatctacaagaagcgcaagcacgacaaggagtcgcggctggagactgtgcaggcgggccggcaggatcgcgagcgctttggctggaaggatgggcgcgtgaacgagcactgttccaagacgaaccgcgagaagcgcaaaaccaagaactttggcatgctgcgacacaaggctcgctccaaggttaagaagagcttcaaggacaagcagcaggcgctgagaaaacatctgctgcatcagaaaaagatgaagtag

SEQ ID NO: 92 - protein, 712 aa, Drosophila melanogaster
  AAF58986
  GI:7303942
MVRPNNNQLPENLPQLQNLIKRDPESYSDEFHIQYQHFLSLLEVFALNPSEENKSLDDIVMFVAQVAQCYPAVCEEFPKRLSDLLKNYATVLDPAMRNCFVKALILLRNKNLVPALDILELFFQLLRCPDKNLRTFLQTHIVTDIKNMNAKHKDMKLNSSLQAFMYSMLKDANPKAAKMSADIMIELYKKNIWNDSKTVNVIATVGCFSKVTKVLVTSLKFFLGHDEEDEEEDTDSENEVDLKGALMANRVNKKTKKRTKQLAQIKKQAVKAQKKKKNAPAFNFSGIHLVHNPQGMAEGLFKQLQATNERFEVKLMHLDVISRLIGIHDLFLFGFYPYITRFLQPHQRQVTRVLQFAAQASHELVPGDIIEPILKTIANNFITERNSSDVMAIGLNATREICMRCPLAMGEDLLQDLAMYKTYKEKSVMMAARSLITLYREQLPALLHKKDRGRQTEAQAERKVRAYGEREVHDTVLGAEALLKDSKTIDIESEDDTDSNDGEWVNVAHSDGEGGGADDDEEDEDEDEDDDDEDEDEENSNDEENEDEDNSDEGVESGEESAKAKKEKKDMRILNQKEAAQELALTRIFTDEDFKRINAANLKKTVTSARKRPLEQDRAEFVKLNSIEMIYKKRKHDKESRLETVQAGRQDRERFGWKDGRVNEHCSKTNREKRKTKNFGMLRHKARSKVKKSFKDKQQALRKHLLHQKKMK

SEQ ID NO: 93 - DNA, 1407 bp, Drosophila melanogaster
  Name: CG7460
  AE003523
  GI: 10727853
  Transcript: CT22955
atgagttccgcgtcattgcgtctgcttagtaaaactaggcaaaccgctcgcattgtgatcgtgggcgcgggatccgctggaatagctgcggccaccaggcttctggatctcggtttccgaaatgtgctcctcctcgaggcggaagatagaatcggcggtcgcgtccacacgattccctttgccgataacgtcgtcgacctgggcgcccagtggtgccatggcgagaaaggaaatgtagtatacgacaaggtcaaggacctgaacctcctggaggtcacggaaccgcactatgaaacctttagatgcgttcgatccaacaaagaagtcctacccgacgacctagcagatcaactgaaaactatagctgatatgtcaataccagaccggcaggcagagctcctggacttcgagggttcgttgggagactacatcaatatgaagtactggaaggagctggccaagcttccgcccatagatcgtaccattgcggaggagttcctggaggtgtttcacaaattcgaagcatccgtggaggcagcggatcacctgtttgaagtatccggaaagggtcacttggagtactggctatgcgaaggcgagctgctcctcaattggaaggacaagggatacaaaagattcctcaaactactcatgaaagcgccagaggatcagtccgaagatcttggtatcctcaaggatcatgtgcggctaaacagacgtattgctgagattaactggaaaggagctgatgagcttaccgtgcgttgctggaatggcgaggtaatcacagcggatcatgtcatatgcactgtttccttgggagttctgaaggagcagcatccgaaactttttgttcccgccctgccagctgccaaatttgagaatcctccgctgccaggcgattggcctggcttcaattgtctttggctaaaggaggacctggaggagctgcgggcttcggaactcttttggctggagagtgtgttcggcttttatccagtctccaggcagccacgcatcctgcagggctggatcattggcccacacgcccggcacatggaaacgctcaccgaggagagggtcctggagggtctgctgtggcttttccgcaagttcctgccatttgaaactgcccatccagtgcgaatgctgcgcactcaatggcatgcgaatcccaacttccgaggcagctacaccttccgttccacctacacggatgcgctgcgaaccggtgcttgggatctggaagctccgctccaggatgtgtgcggcaggccacgcctccagttcgccggagaatccacccacaagcacttctactcaacggtccatggagccgttgagacgggatggcgggaggcggaacgattgcacctctactaccgggcgcgaacatctcagctatga

SEQ ID NO: 94 - protein, 486 aa, Drosophila melanogaster
  AAF49310
  GI:7293951
MSSASLRLLSKTRQTARIVIVGAGSAGIAAATRLLDLGFRNVLLLEAEDRIGGRVHTIPFADNVVDLGAQWCHGEKGNVVYDKVKDLNLLEVTEPHYETFRCVRSNKEVLPDDLADQLKTIADMSIPDRQAELLDFEGSLGDYINMKYWKELAKLPPIDRTIAEEFLEVFHKFEASVEAADHLFEVSGKGHLEYWLCEGELLLNWKDKGYKRFLKLLMKAPEDQSEDLGILKDHVRLNRRIAEINWKGADELTVRCWNGEVITADHVICTVSLGVLKEQHPKLFVPALPAAKVRAIEGLKLGTVDKFFLEFENPPLPGDWPGFNCLWLKEDLEELRASELFWLESVFGFYPVSRQPRILQGWIIGPHARHMETLTEERVLEGLLWLFRKFLPFETAHPVRMLRTQWHANPNFRGSYTFRSTYTDALRTGAWDLEAPLQDVCGRPRLQFAGESTHKHFYSTVHGAVETGWREAERLHLYYRARTSQL

SEQ ID NO: 95 - DNA, 6942 bp, Drosophila melanogaster
  Name: CG17735
  AE003605
  GI: 10727172
  Transcript: CT28225
atggcacaacaaccgccaagtggaccgccgcatgcaggtggacagcaaataacgccaggtgcaaactctgcaaatctaagcattgtagcggccgctttgagcgccgctcgtgacgtcgggggaggatccgacggaggaggatcagcgggaggcgcaacgccagctactggagcatcggcttcatccgtaggaaacaccagcgccgtgggcgcgtcgagcagcagcaacagcagtgccggccaagcagccagcagcaacagcaacaatgtgactgcaacaggatcggggtcggctcctggcggaggacccacgagtaccgggacgaccagtggcactcagcatggtagtggatcgggggcagctgcagccgttgattcggaaagcgatgacagtgaggtcggtcgactacaggctttgctcgaagcccgaggactgccgccccatttattcggtgcccttggcccaagggtgacacatattctccaccgaaccattggtaacagcagcagttccaaggccaatcaacttctgcaaggattacaatcccacgacgaatcccagcagctgcaggctgccattgaaatgtgccagatgctcgtgatgggcaatgaggacaccctagccggttttccaatcaagcaagtggtacctgctctaatacaactccttcgtatggagcacaactttgatataatgaacaatgcatgtagggcattggcatacatgctagaagctttgccccgctcgtcaggcaccgtggtggaggcggttccagtctttctagagaaacttcaggtcatccaatgcatggatgtggctgagcaaagtttatcggccttggagattctgtcacggcgtcacaacaaggccatcctgcaggcaaacggaatttcggcctgcctcacctatttggacttcttttcgattgtggctcagcgggcagcattggcgattgcggctaattgctgcctaaacatgcatccggaggaattccactttgtggcggaaagcttgcctctactagctcgcttgctctcccagcaagataaaaaatgcattgaaagcgtttgttctgcattctgtcgtctagtagagagtttccagcacgacggtcagcgcttgcagcaaatcgctagtccggacctgttgaagaactgccagcaattactgctggtaacaccagccatcctgaatacaggaaccttcacagccgtcgttcggatgctaagtctaatgtgttgcagctgtccagacttggcaatttctttactaaggaacgatatagcggccaccctgctttatttgctcaccggaaatgcagagccggctgctgccagtgctacccacgtggagctgatctcacgctcgccttcagagctgtacgaacttacctgcctcattggggagttaatgccgcgcctacctttggatggaatctttgctgtggactcactgctggacagaccaacgcttaatacccaggaccaggtgcattggcagtggcgcgatgatcgcggctcctggcacaactattctacaattgattcgcgcctgatcgaggccgccaaccagagcagcgaggacgagataagcctaagcacctttggacgcacctacactgtcgattttcatgccatgcagcagataaatgaggacacgggcactacacgacccgttcaacgtcgtcttaaccataactatgtggctcccatgtctgcgggccaggacttgactacaacatcggctggatcggcggccgcgggaggagcttccacgtccgctgcagcagcggcagcgtcctccaacaacaataacaataataataataatccaccaggcaatagtgtcaacctcaatcaagtaaagcgccgtccatctctggatgctagaatcgcatgccttaaggaggagcggggtctggctgcggactttataaaacacatctttaacgtactgtacgaagtatacagctcttctgccggaccaaatgtgcgttacaaatgcctgcgcgcccttctgcggatggtgtactatgccacgccggagttgttgcgtcaggtgctgaagtatcagctcgtctctagccacattgctggcatgctaggaagcaatgatttgcgcatcgttgtgggagctcttcaaatggctgagatcttaatgcgccaacttcccgatgtctttggcacgcactttcgtcgtgagggagtgatctaccagtttactcagctcactgatccaaataatccgatatgcgcgaatccctcgccgaaaccgcttagcgcaacagcaacgcccaccgcaaatgcaggcggatcacaatcggctcctgcctccgccaacagcctgcaagtaaatccatttttcatggatagtgctccgggtttgtcgagtgcttccacgactcccagcagtagcaagcatcaatcgtacagtgtgaagagcttctcacatgccatgaacgccctaacagccagcgccaaaggaactccttctggagcgttggacgccacaagctcatctaccacagctggtggttataattacagcagctcggcaccgtcttcttcctccggagcacccgctgcctactttgtgacccaacagggagatccacgccagtacgtccactttcagcagccggccgttccagcaccaccaccgcagcaggaactgttaccatcaggagttcagcaacaagggcagcaggtgcctcaggtgatctaccagccacatcatcaacagcctgcacacttagtgctggcctccaccagcagtggcgctgcctcgtcgtcttcgtcttcgtcctcttcgtcctcggcctctgcactgcagcacaagatgacagacatgctaaagcgaaaagcgcctccgaagcgtaaatcgcaaagcggtggcagggcaaaatctagacaagaagatgcagcagtcgcaccagcgggatctggaccagggggagcgcctccttcttcatccggctcagctatgcatgaacttcttagccgtgctacaagtcttggtagcgggaacggtggcaggagtacgccaaattcgggaggtggctctggaagctccaagtcccggtttaacgccggaaactcgtccaatgccggatcgagcaaatcttcgttcttggcatcgcttaatccagctcgctggggccgtcaaactcatcaaaatcatcaccatcaccaccagcagtcccagcagcagcatcatggtctttctaaagattccggcaactcgaactcaacaggttccggctccggagctggtttagcatacacggtgagccaacatggcgctggtagtggagccggaggactgaacgctgcagccgttgcggcgagtataagtaagagcatttcccacgccaatctcctagcggcggccaacagagagagggcgcgtcagtgggtccgcgaacaggctgtggattttgtaaagcgttacactgagcaggaggccaaaaggagcaaggcggcatccgagagtggtgccactcagagcgggagtagtggagtgggattatcgtcgacgggcaatactccattgtccacagcgggcagtaccaatgtcctagagcgtttgtccagcattctgtttaagcttaacgggagctaccacgactgtttagatgctctcctcgagctaaagaccattcttttggagagtgacatctctccctttgaggtaaatcattcgggcctgatcaaagccatgctcaactatatgactagcgagactggactggttgagcgcgatgcacgtctgcgcagctttatgcacgtattcgctggccttccattagagcctctgctgcaaaacgtcggccagatgccaactatcgagccgatagccttcggagcctttgtggccaagctaaatggttgtgtcacgcaactagaacagtttcctgttaaggtacacgactttcctgccggtcctggtggaaggtccaatcagagtgctctgcgtttcttcaacacccatcagcttaagtgcaacctgcaacgccatccgcagtgcaataacctacgtcagtggaagggcggaactgtaaagatcgaccccttggccatggtccaggccatcgagcgttacctggtggtgcgcggctatggtggcattcgtgcagactccgacgacgacagtgaagaggatatggatgacaatgtggcggcagtggtgttgtcccaggcgagctttagacacaagttgcagtttacgattggggatcacgtgctgccctataacatgacggtttatcaggcggtcaagcagttctcgccactggtcagtgaacaacctgagacggacaacgagtcggagactcttttaggaaacgctagtatatgggtgcagcagcatactattcactatcgtcctgtagaggaggaagtgacttcgggagcggctgcgggagcagcatccagcagcagttcgtgtagcagtggcgtgcaaaaacagcagagctcttcaagctccgcatccagctgtgtaaacgctacctcttcgtgctcctcatcttctggagtggcaagcggtggcgggtcctgatgttgtgaccgtacaagacgcctcattggatgcactgtgtatgctgcgagttattcatgctctaaatcgtcactgggaccatctctacggttgtgtggtgcgccaaaacattattccccagtcagactttatacatcctaagattatggccaaggcgaatcgtcagctgcaggatccgcttgtcatcatgacaggcaatctaccacagtggcttccccagataggcatggcctgtcccttcctcttcccattcgagactcgtcacctgcttttctacgcaaccagctttgatcgggatcgcgctttgcagcgtctgttggacactacccccgatcttaatgcagcggagtcttcagagcgcgtggctcctcgccttgatcgccgcaagcgagcgatttcccggacagagatactcaaacaggcagagcacatcctacaggactttgggcactcgaaggcactgctggaaattcagtacgagaatgaggtcggaacgggtctgggacctacattggaattctacgctttggtttctgctgagctgcagcgtaccgaccttggcctatggaatggcagtgatagctacaaacagaactctgtgaccattgtagacgtagtcaaggccaacagcgctgtgctgcacatcgaggatgctcttgaggcaaccaccacggaccagaacactccagcagtagcaggagcgtcgcttgtgagcagcagcaccaccactacaacaacaaccgcacaacaacaccagcatccgcccacacgctctagcagtcgttcgcacgtcttgcgtagcggagctggccaacagccggtggagcacagctcctctagcgccggcgccaatgagaatgctttaaatatggttatagcacagcaatttagtgatacaaactctgctaacccagcagcgattgataatcccagcagcaccactaccgcaacaacggttgtacagcataataccactacgaataactcaagcattatcacgactacaaccacgacgagttatgtgcatgcggtgcatggcctgttccctttgcctctgggtaaatcttcgaagcttccgcagatgactaaggccaaggccaaattcaaattcttgggaaagttcatggcaaaggcggtgatggacagtcgcatgttggatttgccattttctttgccattctatcgctggttagtcagcgaagagcattcaatcggcctggccgatctgatgcgtgtggccccggaggtccaaaacactctagtgcgactccaagacttggttcgccagcgggagtacattctatccgatccaaacatcgatgccatggaaaagactgaaaagattgaacagctagacttggatggctgtcccattgctgacctaggcttggactttgtattgcccggacatgccaatatagagttgtgtcggggcggtcgcgatacacctgtcactgtgcacaaccttcaccagtacatctccctggtcacatactggttccttatcgagggtgtccagaaacagtttgaggctttgcgtgaaggttttgattccgtttttccaatccaacggttgcgaatgttctatccagaggagttggagtgcgttttctgtggatcgggcagcgagcagcagcattcgcgatgggaaatcaagatgctgcaggagagctgccgcactgatcatggattccaccaggactcgcaagctatccaatatctgtatgagatcctggcctcttacaaccgcgacgaacagcgcgccttcttacagtttgtgactggatcaccacgccttccgactggaggattcaaggcccttacgccaccactgactattgtacgcaagacgttggatgagaaccaaaaccctaacgattacttaccatctgtgatgacctgtgtcaactatctaaagttgcccgactactctagtcgcgaggtgatgaggcagaagctgaaagtggctgctaacgaaggcagcatgtctttccacctctcataagcaagcaacaaaccaaaacccaaccgaaccccgctttccacaaacaaccagatttacagcaacacaaatcggaaactacaaaaatactacatggaatatattaaggagggtatattccggatggattaattggatgggggtcctatttgcattttttctttcgatcgttagtttcgccgcgcgcgttttcccaagctccttaaatttttcattttggcaagcgcgtgtcatactaaatttcaatataaatatataagtataatatattttttattaccaagttttgcaaaaaagttaaacggaaacacggataacatcgagaaagaaaataatgatggacctctcacacaaaatgttacctttaaaaaatttgaatagta

SEQ ID NO: 96 - protein, 2228 aa, Drosophila melanogaster
  AAF52092
  GI:7296816
MAQQPPSGPPHAGGQQITPGANSANLSIVAAALSAARDVGGGSDGGGSAGGATPATGASASSVGNTSAVGASSSSNSSAGQAASSNSNNVTATGSGSAPGGGPTSTGTTSGTQHGSGSGAAAAVDSESDDSEVGRLQALLEARGLPPHLFGALGPRVTHILHRTIGNSSSSKANQLLQGLQSHDESQQLQAAIEMCQMLVMGNEDTLAGFPIKQVVPALIQLLRMEHNFDIMNNACRALAYMLEALPRSSGTVVEAVPVFLEKLQVIQCMDVAEQSLSALEILSRRHNKAILQANGISACLTYLDFFSIVAQRAALAIAANCCLNMHPEEFHFVAESLPLLARLLSQQDKKCIESVCSAFCRLVESFQHDGQRLQQIASPDLLKNCQQLLLVTPAILNTGTFTAVVRMLSLMCCSCPDLAISLLRNDIAATLLYLLTGNAEPAAASATHVELISRSPSELYELTCLIGELMPRLPLDGIFAVDSLLDRPTLNTQDQVHWQWRDDRGSWHNYSTIDSRLIEAANQSSEDEISLSTFGRTYTVDFHAMQQINEDTGTTRPVQRRLNHNYVAPMSAGQDLTTTSAGSAAAGGASTSAAAAAASSNNNNNNNNNPPGNSVNLNQVKRRPSLDARIACLKEERGLAADFIKHIFNVLYEVYSSSAGPNVRYKCLRALLRMVYYATPELLRQVLKYQLVSSHIAGMLGSNDLRIVVGALQMAEILMRQLPDVFGTHFRREGVIYQFTQLTDPNNPICANPSPKPLSATATPTANAGGSQSAPASANSLQVNPFFMDSAPGLSSASTTPSSSKHQSYSVKSFSHAMNALTASAKGTPSGALDATSSSTTAGGYNYSSSAPSSSSGAPAAYFVTQQGDPRQYVHFQQPAVPAPPPQQELLPSGVQQQGQQVPQVIYQPHHQQPAHLVLASTSSGAASSSSSSSSSSSASALQHKMTDMLKRKAPPKRKSQSGGRAKSRQEDAAVAPAGSGPGGAPPSSSGSAMHELLSRATSLGSGNGGRSTPNSGGGSGSSKSRFNAGNSSNAGSSKSSFLASLNPARWGRQTHQNHHHHHQQSQQQHHGLSKDSGNSNSTGSGSGAGLAYTVSQHGAGSGAGGLNAAAVAASISKSISHANLLAAANRERARQWVREQAVDFVKRYTEQEAKRSKAASESGATQSGSSGVGLSSTGNTPLSTAGSTNVLERLSSILFKLNGSYHDCLDALLELKTILLESDISPFEVNHSGLIKAMLNYMTSETGLVERDARLRSFMHVFAGLPLEPLLQNVGQMPTIEPIAFGAFVAKLNGCVTQLEQFPVKVHDFPAGPGGRSNQSALRFFNTHQLKCNLQRHPQCNNLRQWKGGTVKIDPLAMVQAIERYLVVRGYGGIRADSDDDSEEDMDDNVAAVVLSQASFRHKLQFTIGDHVLPYNMTVYQAVKQFSPLVSEQPETDNESETLLGNASIWVQQHTIHYRPVEEEVTSGAAAGAASSSSSCSSGVQKQQSSSSSASSCVNATSSCSSSSGVASGGGSLTKKAHKSSSKFMRKKTELWHEGIAPVVISALKPFLSSSLPADVVTVQDASLDALCMLRVIHALNRHWDHLYGCVVRQNIIPQSDFIHPKIMAKANRQLQDPLVIMTGNLPQWLPQIGMACPFLFPFETRHLLFYATSFDRDRALQRLLDTTPDLNAAESSERVAPRLDRRKRAISRTEILKQAEHILQDFGHSKALLEIQYENEVGTGLGPTLEFYALVSAELQRTDLGLWNGSDSYKQNSVTIVDVVKANSAVLHIEDALEATTTDQNTPAVAGASLVSSSTTTTTTTAQQHQHPPTRSSSRSHVLRSGAGQQPVEHSSSSAGANENALNMVIAQQFSDTNSANPAAIDNPSSTTTATTVVQHNTTTNNSSIITTTTTTSYVHAVHGLFPLPLGKSSKLPQMTKAKAKFKFLGKFMAKAVMDSRMLDLPFSLPFYRWLVSEEHSIGLADLMRVAPEVQNTLVRLQDLVRQREYILSDPNIDAMEKTEKIEQLDLDGCPIADLGLDFVLPGHANIELCRGGRDTPVTVHNLHQYISLVTYWFLIEGVQKQFEALREGFDSVFPIQRLRMFYPEELECVFCGSGSEQQHSRWEIKMLQESCRTDHGFHQDSQAIQYLYEILASYNRDEQRAFLQFVTGSPRLPTGGFKALTPPLTIVRKTLDENQNPNDYLPSVMTCVNYLKLPDYSSREVMRQKLKVAANEGSMSFHLS

SEQ ID NO: 97 - DNA, 2357 bp, Drosophila melanogaster
  Name: Gycalpha99B
  AE003770
  GI: 7301790
  Transcript: CT3044
catttttcaggcgtgcgaaaaaattcctcagcgctccaagaatttccacagcaattttggtcactgctttaaagtgagcataaagccaagaggccagcgaaagaatttttattttcttaaccaaatcgaatagaggccacccgagaggcgagcacgcgacatggcgtgtcctttcttcaggcgtgcggactcgctgacacgccagccctcggtcatcgccgagcctggtggccactgggcgctcgaggacgaggagctctcggacgacgccctgaccctcacccacctccagatggccatccagctgctgacggcgccgtcgaacgaggatctcaacacggctgtaacgtctttggtggccaagtaccgccagaactggcccaatatccacaagctcaaactggatccgcaaaccttcaagagctgtgccaactatgactacttggcggacatccaggagctgctgctgaagatggacgaggccagcgccagcgagattctggtgctgctcggcgaggagctgatcacctgctgctgcacaggtatcattgaaagagccttccgctgcctgggcaccgatctgcaggaattcctgggctccctcgatggcgtttacgatgtgctgaagctgcaggaggaggacgtcaccgataccggattcgtgtgtgccggcgagggcgagctgatcttcacctcggagcgcccggtcattgcctggttgctcctgggctccctgaaggcgctcacccgcatgctctacaaggtggacgtgaacatcaagatcgagcccgtggagggcgatgcccggcggtatcgctacctcttctcgctggtcaaggacaactcccagaccatgctgatgggtcgtcccacttccgtgagcaaaaccatcccggaaacggtgcagcggagcaactcgagcaacgcctccgacctgcaaatgaactcgtccagcttctgcaagatgtttccctggcacttcatcatgaacgagcagctggaactggtgcagttgggcaggggattcagcaaattgtacaagccctacatggcggactttggttgccaggcgaccacctactttgatttcaaacgacccaagggattgaccatgaaattccgggacatcgtgaggcgcacctacacgcctttcctgatcggtttgaataatccgccgggcgctgtggatttcccggccattggactggagatcaagggacagatggtgcactgtcccgagtccaattcgttgctcttcattggatcccccttcctggacggcctggatgggttgacctgcaacggactcttcatctcggacataccgctgcacgacgccaccagggaggtgatcctggtgggcgaacaggctcgggcccaggatggactgcgccggcgcatggacaagatcaagaacagcattgaggaggccaactcggcggtgaccaaggagcggaagaagaacgtcagtctgctgcacctcatctttcccgcggagatcgccgagaagctttggctgggctcctccattgacgccaagacgtatcccgatgttacgatcctgttcagcgacatcgttggcttcactagcatctgctcgcgggccactcccttcatggtgatcagcatgctggaggggctgtacaaggacttcgacgagttctgcgacttcttcgacgtgtacaaggtggagaccatcggggatgcctactgcgtggccagtggactccaccgagcctccatctacgacgcccacaaggttgcctggatggccctgaagatgatcgacgcctgctcgaagcacattacccacgacggcgagcaaattaaaatgaggatcggcctgcacacgggcactgtcttggcgggagtggtgggcaggaagatgcccaggtattgcctcttcgggcacagcgtcaccatcgccaacaagttcgagtcgggcagcgaggcgctgaagattaatgttagcccaaccaccaaggattggctgaccaagcacgagggctttgagtttgagctgcagccgcgggatccatcgttcctgcccaaggaattccccaatcccggcggcaccgagacctgctacttcctggagagcttccgcaacccggctttggacagcgagctgccgctggtggagcacatcaatgtgtccatgaagaccatatccgagggcggcgatgcctagaccccccgtagctccaatccccccgtagaccacccacacgctcagtagtcctagttcggtgcacttgtattgtggttttgcctgttgcctgcttagcctagaatcaataaaatatcccattcgaatggttgcatttcagcatagagatgaacacattttattggtt

SEQ ID NO: 98 - protein, 676 aa, Drosophila melanogaster
  AAF56917
  GI:7301807
MACPFFRRADSLTRQPSVIAEPGGHWALEDEELSDDALTLTHLQMAIQLLTAPSNEDLNTAVTSLVAKYRQNWPNIHKLKLDPQTFKSCANYDYLADIQELLLKMDEASASEILVLLGEELITCCCTGIIERAFRCLGTDLQEFLGSLDGVYDVLKLQEEDVTDTGFVCAGEGELIFTSERPVIAWLLLGSLKALTRMLYKVDVNIKIEPVEGDARRYRYLFSLVKDNSQTMLMGRPTSVSKTIPETVQRSNSSNASDLQMNSSSFCKMFPWHFIMNEQLELVQLGRGFSKLYKPYMADFGCQATTYFDFKRPKGLTMKFRDIVRRTYTPFLIGLNNPPGAVDFPAIGLEIKGQMVHCPESNSLLFIGSPFLDGLDGLTCNGLFISDIPLHDATREVILVGEQARAQDGLRRRMDKIKNSIEEANSAVTKERKKNVSLLHLIFPAEIAEKLWLGSSIDAKTYPDVTILFSDIVGFTSICSRATPFMVISMLEGLYKDFDEFCDFFDVYKVETIGDAYCVASGLHRASIYDAHKVAWMALKMIDACSKHITHDGEQIKMRIGLHTGTVLAGVVGRKMPRYCLFGHSVTIANKFESGSEALKINVSPTTKDWLTKHEGFEFELQPRDPSFLPKEFPNPGGTETCYFLESFRNPALDSELPLVEHINVSMKTISEGGDA

SEQ ID NO: 99 - DNA, 1158 bp, Drosophila melanogaster
  Name: CG13893
  AE003468
  GI: 7291959
  Transcript: CT33427
atggatgatgcgttggttggaacccacgacgattacttcttggtgcgctggctaagagctcgaaaatggaatctggaggcagcggagaaaatgctgagagctagtttgaaaacacgcgccatgtggaatgtggacaacatcgagaagtgggatccaccgaaggcattgcaggagtatctgccatacggcctcatgggctacgacaacgaaggatcaccggtgctggtctgcccctttgccaacttcgacatgtggggcatgatgcactgcgtcacgcggtttgagttccaaaagtacctggtcctgctgctcgagcgcttcatgaagatcgcctacgatcagagtcaaaagcacggatggcgagcccgccagctggttgtatttttcgacatgcaggatgtgaacctgaagcagtacgcctggcgaccggctgccgaatgtgtgatctctacggtgaagcaatacgaggccaacttcccggagctcctcaagatgtgctacatcatcaacgcacccaagctcttctcggtggcgttcaacattgttaagaaattcctggacgagaacaccaccagcaagatcgtgatctacaaatccggagtggaccgctggcaggagcaactcttctcccatgtgaaccgaaaggcatttccgaaggcctggggcggcgagatggtggacaggaacggagatccccagtgcaaggcactgatggtctggggaggcaagctgccggaggagctttacattgatcagagtagccagcagagcgatcgagactttgtggaggcccaggttcccaagggcgacaagttgaagctgcactttaaggtcaacgttgaggagcagaagatcctctcctgggagttccgcacctttgactacgacatcaaattcggcatctacagcgtggacgacaagacgggcgagaagcgcagcgaggtgcccctgggaaccgtgtactccaacgagatggacgagattggttacatctctacacgaccgaacaccacttacacggtggttttcgacaactccgccagctacctgcgcagcaagaagctccgctactgggtggacctcatctctgaggaggaggagggcatatccgagctgaccacccagatggacaacactcagattgcgaatcagcagtga

SEQ ID NO: 100 - protein, 407 aa, Drosophila melanogaster
  AAF47396
  GI:7291980
MSGPLPEISEEQRAILEKFRKQMDDALVGTHDDYFLVRWLRARKWNLEAAEKMLRASLKTRAMWNVDNIEKWDPPKALQEYLPYGLMGYDNEGSPVLVCPFANFDMWGMMHCVTRFEFQKYLVLLLERFMKIAYDQSQKHGWRARQLVVFFDMQDVNLKQYAWRPAAECVISTVKQYEANFPELLKMCYIINAPKLFSVAFNIVKKFLDENTTSKIVIYKSGVDRWQEQLFSHVNRKAFPKAWGGEMVDRNGDPQCKALMVWGGKLPEELYIDQSSQQSDRDFVEAQVPKGDKLKLHFKVNVEEQKILSWEFRTFDYDIKFGIYSVDDKTGEKRSEVPLGTVYSNEMDEIGYISTRPNTTYTVVFDNSASYLRSKKLRYWVDLISEEEEGISELTTQMDNTQIANQQ

SEQ ID NO: 101 - DNA, 3065 bp, Drosophila melanogaster
  Name: CG18176
  AE003551
  GI: 10728019
  Transcript: CT41038
tgaaaacctcaataaacacgatttatctgcgataaatgtgagtgaggaaacctgtaaccatgtctcacctgaccggcacccgcgtgagcaccttcaacgagagcttccttaacgaaaatgagcacgactcgaatgcggtgctcatggaactggacaagggactgcggagcaccaagcagggaatccagtgcgaggcggtcgtccgctttccgcgcctcttcgagaagtatccgtttcccattctcatcaactcgtcgttcattaagctggccgattactttgtcagcggatcgaatctgctgcgcttctgggtgctccgtgtttgccagcagagcgagaatcatctggacaagatcctcaacattgacagctttgtgcgctgtatctttgtggtgatgcactccaacgatccggtggcgcgtgctctcctcctgcgcaccttgggcgccgtttcccgtgtgattcccgagaagcaacaggttcatcatgccattcgacgtgctctggatagccacgataccgtcgaggtggaggctgccatctatgccagcagctgctttgccgcccagtcaagttcctttgccatcagcatgtgcgccaagatttcggacatgatcgaatcgcttcaggtgccggtgccaatgaagctgctcctgattcccgtgttgcgacacatgcatcacgaggctaccacagcgtcactggttagcagactgtgcatggatctgctgcccaaatatccagcccagagctttgtggtggccatcatagacacgctcactcaattgtcatcacgaacgctggtgggagtgcccggtcagctggatgttctgctggatttcatgcaggacttaaggacaccagtacgcatacaggtgctgcgatctttcaacgagttggccggacgtcagagcgttcatgcctggcccaagccagccatcaaagcgctcattgatcgttttgaattgtgtaccaattccaaggagcagttcctcttcctctcaatcctgctgaagttaagcgagtgcccgcttacttgccagcagctgcttcgcgagcatcgcgtagccctgctccgtttgtgcatccagtgcattagcaagctggacgactacaccaccgccactcaggccatggcagttttgtcggttctagtagcatttggtttaaaaaaaaagggcagcggcgagcaggtggacgatattcttcatatggtcaacctgcacatggaaggattgctcctttgcacggccaagcggtcggagtgcacccgcgatctccgtagggtgctgacatacggtataaggatcactaaagccaacgctgaatttggaacatccttcattgggatcgtgaccaatagcctgggagataagggtgcctatccgccagccaatgcggaacttatgtgcgaggcactggcgggtctgtgtgagcactttcagctgcgtaagtacgccttttccaccgcagaagatttgatagtagacgaaaacgcgatggacaccgatgagttgcccccgcccaagataaatcccatgctagctcgtttgccgctcattctgcacaagctgaacaccattatcgaccaggagaattgcgatcaacagttgcgcagcgtggagatcctgagttctctggttctacaaaccaccatgggctgttacctgccgcaaaaggttgttcagtgctttgagaaatgcctcggtaggcttaactgctggacgctgtataggattgcacgcactgctagtcgctatggtcaccactatgtggctgctcacatttacaccaaggtctcccagattgtgatcagcgatcatatgcactatttcctggtggcactgtcgcagatctcgcaggcggagtgcattcttaactatggcttggaatacgcctacatgcgggacaattatgcaccaaaggtggcaccggaacctctaattccgctgatgaagcgcttggaaatggctagtaatctctatcagcaagcgctggccagcctgcgagctggctcctcgccccagcatccgtgcacctttcagttggagtatctgaagataagggcgcagtttctgcagacccttcacctggctgtgaccgtaaagaatgcccaggtgattgtgccgccaccggcaatagctggaagtttggcccagaactcgcgcgactatctgcaaaagtttggtcatgtcacgaaccagctgcgcaagctggtgaaggcactaaaggcctgcgaggagacttacgctaggctatacaaatcctctttcgatgcggatcacgtgacgctggagtttctggaggtggctgaatttcagtgcgctcttttcgcccacatcatcgagtcgatttgctacgccacgcctccggaaccgcctgtatttctaaccacaggcgatcacccggagacgcgctactttgccgcaagctgccagcgcatggagcagatgcaaaaaaacctgccacaggagccggccaatgccaagaccattagtaaccgacatttggatgtcatcattgcgcagatcgagatcataacaaagacaccgctctgcctgccgcgttacttcttccagattctgcagtccacacagatcaagctatcggtgagtccgcagccaaggagcgccaccgaacccgtgaatgtccagtcgggcagtaatctggttatcaaggtcgagggtgtcctgcagcactttagcaagcagaagaaacacttccgtcgcgtggagtccgttcaattaagcctcacctcacagctaatcacgccgccaccgcgatcctcgcaagagctgcccaagcagggcgccaacgatactgtgaccctcaatcagattgtaaagccccagcgcgatttcctctccggcagcttcctgttgcccatctccaatggcgggcacttccaggtgacgctggaaacattcgtggtggacgagaatggcattacctggtgcactggccccaaatcctcgatggtggtgcgggtgctggaggatcctagcaagcagggcgctccagcgccgagcacttcccaggcagtgggacagacgaggaggttttaa

SEQ ID NO: 102 - protein, 1001 aa, Drosophila melanogaster
  AAF50214
  GI:7294884
MSHLTGTRVSTFNESFLNENEHDSNAVLMELDKGLRSTKQGIQCEAVVRFPRLFEKYPFPILINSSFIKLADYFVSGSNLLRFWVLRVCQQSENHLDKILNIDSFVRCIFVVMHSNDPVARALLLRTLGAVSRVIPEKQQVHHAIRRALDSHDTVEVEAAIYASSCFAAQSSSFAISMCAKISDMIESLQVPVPMKLLLIPVLRHMHHEATTASLVSRLCMDLLPKYPAQSFVVAIIDTLTQLSSRTLVGVPGQLDVLLDFMQDLRTPVRIQVLRSFNELAGRQSVHAWPKPAIKALIDRFELCTNSKEQFLFLSILLKLSECPLTCQQLLREHRVALLRLCIQCISKLDDYTTATQAMAVLSVLVAFGLKKKGSGEQVDDILHMVNLHMEGLLLCTAKRSECTRDLRRVLTYGIRITKANAEFGTSFIGIVTNSLGDKGAYPPANAELMCEALAGLCEHFQLRKYAFSTAEDLIVDENAMDTDELPPPKINPMLARLPLILHKLNTIIDQENCDQQLRSVEILSSLVLQTTMGCYLPQKVVQCFEKCLGRLNCWTLYRIARTASRYGHHYVAAHIYTKVSQIVISDHMHYFLVALSQISQAECILNYGLEYAYMRDNYAPKVAPEPLIPLMKRLEMASNLYQQALASLRAGSSPQHPCTFQLEYLKIRAQFLQTLHLAVTVKNAQVIVPPPAIAGSLAQNSRDYLQKFGHVTNQLRKLVKALKACEETYARLYKSSFDADHVTLEFLEVAEFQCALFAHIIESICYATPPEPPVFLTTGDHPETRYFAASCQRMEQMQKNLPQEPANAKTISNRHLDVIIAQIEIITKTPLCLPRYFFQILQSTQIKLSVSPQPRSATEPVNVQSGSNLVIKVEGVLQHFSKQKKHFRRVESVQLSLTSQLITPPPRSSQELPKQGANDTVTLNQIVKPQRDFLSGSFLLPISNGGHFQVTLETFVVDENGITWCTGPKSSMVVRVLEDPSKQGAPAPSTSQAVGQTRRF

SEQ ID NO: 103 - DNA, 5673 bp, Drosophila melanogaster
  Name: CG8858
  AE003823
  GI: 1072617
  Transcript: CT25438
atggaaactggaccgaatgcagaaattgagcttctggagcgcgtcctgttgcgtctgggaaatgcggactcggatgagaagctggaagccgctgtgggcaagttcctgaccccggtgatcctcaaaatgaactcgccccacaatgtggtgcgcacaaaggtcgtagaagtgctcacccatatcaagaggcgcctgtcgtcgcgcggacatgtgcaaatacccgtagaggcactgctggatcagtatgccgcccaggatagcagcaccttcctcaagaacttcgccatcatattcattaccatgggctttccgcgcctggcgttggaacaacagactgcgctggccagcaaagtggtgggctgcgaggacaagctggagagctaccaggacaagctgttcgccctgctgctgcccgtactgtcggacatgaagattcccgacgacccgacgcagcgctcaaagctacttgatctgcaggacaagccagccatctgtgcaaactttttggcactgctccaggatgtgctcctcctgccctatggcatcacccaggaacaggatgtgcctccgggtctgagcccgtacagttttacacgcatcatcgcctacaattggcgggccgaagaactggaaaaggtcaagaagggaatagttcgtttcctgtgcgccagtgtgtttagtgatttgcagatattcgtgccactggtggtggcttccgcggacacacgtttcagcgtagccactccagcaatcacagagctgagcaagctctgtacaatgctggatttcagcaacccagcggtgactgccccgttgtacactctgttcgctggcaaccaaagcaagataactgaccgccagacacgtccctgctgcgcccgagtgcgccaaaaattgctgcagtacctcatcaagtgccgtggcaaaagcattaacgtcaccaagggcttgcaggtgacctttgatggcttctttggcacaaacaccaaccagaagtgcaaggtcctagcgctacagtttatggaactgctcctcagagatggtccccgcgagctggtctcgaaggtttccaaggtaatacttaccggcatcaccaaaatcattggacgtgactccaacgaaccgaacgatgtacaaaatgcagcatattccgctttggcgcaacacgctcgcagttttccgcaagacgtaagccaggatctgaaactagtccttggatacttcaacaacctggccagctgtgcaccagaattgcattcatccataagggaagcattggtttcgatggctcccgcattcgcttggaagaccaaggagaagagcgatgcaatggaggtggataagaatgtcgattcctcaagcgtgaaactggatggccaacagcacctgctattggccatgctgctggacaatgctgagtccaaagtgcagatcgtgcagaatgtgaccagtgttttcctcaccagctgctatccggagtactatgcaccagccagataccttttgctactcatcgcaggagagcgaaattccctacgcgagaatgtgaccacttacttgtacggcacctcgaagaaggatcacataaattacagcatgctctcttccatcgatcattctaagaaccgcataagcagcgagtctataagtgactttaatcacttgtccctggagcagcgtagggttatgctacccagcttccaggtgatgatgtcgcacgtccatgagatggccgaaaaacgcctaaaaaagaacacggcctgcgtggtagttggccgtacaaagctgccctacagcctggaggtatacgaggagcttctagattatctgcgtctgtgcttgtggtactcggctggagtggttgccgctcccggcgacgagaagtacacccatgagctgcgcgagtacatcaccttgcattacgaagatacggaggataatgcactccatcaatatgcgcagtttgtgcagcgaagcgtagaggccaagagaagtgaatccaatctcatttgcctatatgatctgttgaatgccgctccggaactctttgctgctaagcagctgcatttgctggaaccactgggcaacactttgaaagatgtatcggagactatgcgtatcaacgtggctcaagtctatggtattctctgggcttttggtctctccgatgagaaattcgatgaagaagtgggtgaatgcctgaatagcttaacgcaaaaaacattggagcacaagcatggatggcttctcgtggtgggtcacacgttcaatcgcaaaattgctatgcttaagcaggagaataagaccaaggactttgctgcctggccgcagtttgttaatgcggtaaaaataatctcaaaatgcctctgtgaatcccaatggttgctggtgtcagcagcagtgaaatgcatctctatgatcggcaaggctgtggaaataccaaatgtccccgtggagatccaggttccatccaaagatggagacgacgacgacgaggagatgaccgagtatacgagcatagattcctcgacaaaacttgttatctttggcgtcgtctttcaattactgcgaagctcctcagcgcgtcaaaagattcgcgaggactcagccagatgtctcggatatctggccattggcgacggcgaacacttcaccaaacgcaacctggataagtttcttaccctgaccaagattcaaaaggatgctgctctaaacatagccatttcggaagcgatcgtaaacacactttgtggctatgatgtgaacaaggggcaacccgatgagaagtttgttaataagcactgcaacgatgacgactttgatcagttcctgaactctctaatacgtctggtcaccgatcccaatccgcattcccgtcaggccatatccgtgtggcttctagctgtggtaaagcactgcagccaacgtccagctgtattggccaaaaaagagctgttgcagttcgcttttaccgaacttctttcagatgacagcgagtttgttcaggacgtggcttctcgcggcctggggctggtctactcgatatcggattctggaagccaaagtgatttggcaaactcgctgttggatcaactgattgggggaaaacgaaaggtcaatcaagtaaccgcagacactgaactctttgccgaaggaatgctgggtaaaactccaacgggaggcaacattaccacctacaaggagctgtgttccctggcatccgatctcaatcagccggacatgatctatcagttcatgcagctggccaatcataatgccacatggaccagcaaactgggtgctgctttcggattgaaaaccctttctgccgagtcaaggcagaagatggagccatatctgggcaagatcattccgcgcctctatcggtacaagtacgatcccacacccaagattcagaactcgatgatctccatttgggatacgattgtgactgactcgaaggaagtgaccgagcgttactactgggaaatattacgcgagctgctggacaatctcacttgcaaggagtggcgagtgcgaatcgcctgctgcctggcagtaagggatctcctaaaccgacccaacgggcttaagctacgctcggaggagccggttcgtcgtgctctccccgataacagtatggaagtggatgaggtccctgagccggagctgaaagagctatggttccagctgtttcgtgtgatggatgacattcatgagggcacacgggtcgctgcccacggaactgcttcattcctcggcaagctgtgtgtcatcgcatcgtcatcggatcatggcaaatccgggacagccgtagcgtcatcgatactgccatttctgctagaaaccggagtgggtcacaaagtgcccgagatacgtagagttagcattaagaccatttccgacatgattgattcctcgggatcgcttattgccccgcatctcgccaccctgattccctgcctgctacgagccactggcgagttggagaacaccaagctctcctacgtatccactcgcttgggtgcggacaacgaggcccaggaggcggtggatacgctacgagcggaggccgccaagtcgcttcataccatggaaaccattgggaagtgtgtccgttatatcgactatagcgttttggagaagatgacgcccgaagtgctggagctcatgaagggtagtgtcaacctcggaaccaagattggctgtgcccattttgtttgtctgattagcattcgcttaggcaaggagatgacaccattggtgggaaaatacattcgtgcctgctttgtgggcatcaagaatcgcaacgccactgtgcgcaagtacaacgccagtgccattggccacctgttgggcttggccaaagagcagtcgattaaaagtctattcactaagctggaagagttatatgccgagcagccaggaaatcgctccattgcacttaccattcagtccattaacaagcgtcaccatgaactgctcaaggactacatggacagtatgttgccgctgatcttctttgccatgcacgaagagcccaatgaagagacgaaagctaatgtcgagctgtggaaggatctatggcacgacgttagcccaggtgacgcgggcatccgtctcaatttaaatgtgattatacccaaactggagtcatctctaaccgatgccagctggtcgcgtaaagctcaggcagcgaatgcgatccaaacgatagccactcgcctaagtagctccttggatgagcccgaccgattgaggctgatcaaactccttctaagcggtctgcaaggacgcacttttgagggcaaagagcggctattgcaagctttggccgcactcaccaaaggattggatcggaaccatcaaatctgttccagcattatcgacgcggccatgagggaagcaagaaagagggaacctgtttaccgcaccatggccctggcttctcttggcgaaattctcgatcaactggaagcggatcgctttgaggaagtgtacaacatgagctggaacctgctggaaaagaaggaactgcgcaaggagtcggacgacgaggacgagcccaacaccagtcaggaactgtctgccgacgagcgcaacaagcgggctcaaacactcaatcgactaaaggaggttgtgtgggagacactgggcaaatcctggccgcgtcactccatcgagacgcagcaccgctaccaactcttctttgccgaaaactgtacgagcattctggcggagagcactcgcccagtgcaagtcagtctgctggcagcactcactaagtacatcgaaagacttcatgtctttgatgagtctgctcaagtgccggatttgactcagataaaccaggagaagaagatcaagacagaggagacggcgccaaaaacccgagaggccattgtcgagaagatatgcacagatgttttggctgcagttgctcttgccgctggagttcctcattccggtttgaaaaaggaggcgctcaacatcgttcttatgctgatcaagcggctgagcggaagcggaaacggaaaccagcagccactgaggttgatcaagcagagctttgaatcgaatttggaaaagttccagcgcgattcggcgccggaaatccggtgtcgcatcaaggacatcgaagacaagctaagcaagttgaatccacagaattaa

SEQ ID NO: 104 - protein, 1890 aa, Drosophila melanogaster [sequence omitted]

SEQ ID NO: 105 - DNA, 5201 bp, Drosophila melanogaster
  Name: Ac76E
  AE003515
  GI: 10733346
  Transcript: CT23940
tcgaaagcggttgagaagcgattttcaggcggtcgcgtttttcgcgcgtttccttgcatcggaaatagcaagtgtgcgcctgtgtgtgtgtgtgtgcgagtgtgtaaatgtgttaatgtgtattttttaaacaaaatgtgccattgggaaatgtctccgcatctatgcaatgcacaaatatatatagataaatagatttattggttcaaatgattaggaaacaaacaacaacagaggattatacgagcagcaattagagttggatttctccatttccgggaggaaggaaggaagtcggcaacaagtgttggatccccaggagcagaagtcgcaaggacttgcgtccagggtgaggcaatcaggacgcgcagctggcggctgtgaggagtgccactagctacacgccaccgcttttcgccatggtaaatcacaatgcggaaactgcgaaaacgggcaatggcacaaatgcaacagcgaatctgattgttaaggccgacggaaatgcaacgcagccgaaggcgatgacgtcatcggcggccaggatgaatgacgccctttcggcatctttggccgatttgagcgagcaggaaaatggaaccacgggtgaggctgaggacatccacctaaacgatttgtatacccgctaccgccagaggctccgcaagtcgcttttcagatcgggattgttaacttcgctgctggcatgtgttgtgtccataataattggcatcgtttacggccagcacctggtgcagaccatgctcttagtcctggctgccctaatctcgggatccattctcacggccctgcagttcccggcggtgctgagctccccggcagccgccttggccttcgccatcgtcaccaccttctcactgggcaccattgcggccatcaccggggacgaactggctcccctgcccatgtacgccctcttcctgtgcatccactccatgctgcccatttcgtggcccgtctccgtggtcctggctctattcatgaccgccattcacatcgtttaccgcatcggcacaagtcccgactacgcgcccaatttgccaatgctcttcggggagattgtgatgttggccagcgcctccgtttccggtctctactaccgcatcatgtcggacgcagcccacaaccggacggtggacggaaccaggacgggaatcgaacagcgcgtgaagctcgagtgcgagcgggagcagcaggagcaattgctcctcagcgttattcccgcctacatcgccgccgaggtgaaacgcagcatcatgctgaaaatggcagatgcctgtcagagagccggaggacaggcgtccacttcggccacccggttccatgagctccacgtccagcggcacacgaatgtcaccattctgttcgcggatattgtcaacttcacgcccctttcaagttccctgacggccagcgatttggtgaagaccctgaacgatctgtttggacgattcgatcaaatagctcaggagaaccaatgcctacggatcaagatcctgggggattgttattactgtgtgtccggcctgcccatttcccggccccaacatgcaaccaactgtgtcaacatgggcctgcagatgatcgatgccatcagacacgtgcgtgaggcgaccggcataaatgtcgacatgcgaattggcatccacactggcaacgtactctgcggcgtccttggcctacgcaagtggcaatttgatgtttggagcgacgacgttacattggccaaccacatggagagcggcggtgtcgctgggcgagtccacatcacgaagcaaactttggacttcctgggcgacaagttcgaggtggagcagggcgagggtggcaatcgagatgcgtatctggcggatcacaaggttgaatcgtatctcattgtgccaccgaaaccagcatacacctacagcgttccacgcgtggtggaatgcattgagcagaacgatcccagtcccaccaccgaggagaccaaggagatcaaggagacggatcaatcccatgaagccaccgatgtcgccgatgtccttcttccggtaactgtggctccaccgcctgcaatcgttgacgagaagatgtcacccacctcgatcaatagccaggaggcacctttgcatgcccctctcgcctcagccgcctccatgtccattaaggagctgtccgaggaggaggacgaggctgatgaggccactgccgtcaccgagccgctgatgcacagggatcaggatggcaagaatgacaaggagccgaaggcaaatggtggccatcgcggcagtggtgattccgccgcctccgagtcggtggccaagtccgctgccctttccctgcccgccgatgatctgctcagtatgagtgggtcagagagcggcatctccaacagcggagcccaggcgcaatcctcgaatccggcgagtgtcacacccaccgcagccgctccagccggaggagccgcctccaacagcttgacggtggccgaggccccggagagatctcgtcggaagttgtccgttcaaggtctgatgtccttcgccgacagacgacgctcctccggagccttcatcgaaggacgaaagctgtccatccacagcggagaaagtttccgcagtcatgcgggtaagtagcatcgccatgattgaatcaaatttactgccgccggagcgtaaatgtttcaattttaatttcttcgggccgcccacggagctgaagccgttcaccatgtggtaccgcaatacgccccgggaggccatgtaccgcgcccagccggatacgcacttccggttcgacctgatatgcgccttcgtcctcttcctctcgctagccgtcgtccagctgattgtaatcgaattgaacctggccctccttggatccctcctggccagcttcgtctcgctggccctcttcctctacctgagcaacatgtccgtgccggacgtgcacgcctccactacggagcgaaatggtcccggccaggtggtggccagcagtcgctacttacggctggccatgttcgttgtggtcaacattctcatttcatcttgcgcggtgtttagtgtgataaactacactgtgcctgacggggtaagcaaggagccatcatccaatcagaccatcctggagagcaatttttcgagtgtgttcgtaaactccaccctggaggatgtgcagctgtgggaaatcgattatgccatacccattgcgcccgtatttctgtattgctgtgccattagtttggctgcaatttccgccttcctgcgatccggatttattctcaagctgattgccatgctggtggctgtgatcgcacaggtgacagttcttgggtacagtgatctctttgagatgtacaacgatgccaacatcacacacggcttgccacttgagatcaagggcttccttttgcttctggtgatcatcttggtgcttcacactctggatcgccagggtgaatatgtggctcgcacagatttcctctggaaggccaagttgaaggtggagcaggaggaggtggaaaccatgcgtggcattaacaagattctgctggagaacatcctgccggcccacgtggccacccatttcctgcacctggaacgctccacggagctctaccacgagagctactcctgcgtggccgtcatgttcgcctccattcccaactacaaggagttctacgatgagacggatgtgaacaaacagggcttggagtgcctgcgtctgttgaacgaaatcatttgtgattttgataagcttctcttgaaaccaaagttcagtggaatcgaaaagataaagactatagctagcacatatatgtgtgcctcgggcttgagacccggcaaggaggacggcgctacggacgagaagcgcacggaggagcacaacgtggtcattttggtggagtttgcgattgctttgatgtccatactggactcgattaatcgcgagtccttccaacgattccgtctccgcatcggactcaatcacggtccggtgattgccggcgtgattggtgcccagaaacctcagtacgacatctggagcaacacggtcaacgtggcctcccgcatggactcatgtggcgtaatgggacgacttcagacgacggaaaacacggccaagatattgatgaccgccggctatgagtgcgagtgccgaggcctgacttatgtaaagggcaagggcaatctagtcacctactttgtaaagacacctttcgatgggaaattgtagatcaccgatcgtcacccagttgctgttgatactatttaatctatttaatggatatttatgaacatgtacacgtagcctaggccaaaagtcacttagaagcatcttcttatttattctttgcgattatcatttagttgtaatggattgcaatcgcaggcatttaaagtacgttgctcatcacgcgcacagttgagtattgttagcaacaatttgtttttagttagttggtagtgttaaattgttattgactatttcgtacgatttgttagctaatcttatgcgaagccatcacttaaacagcgaatatttatatttatatacgattcgaattaaattatgatagacaatgaaatgcaatttgaacagccccgccccaatccagaaacatatctattgtctactatatagtatctgctcgttttcattcttatctgagactcttaagatctatttccctctccactgcgaacagcaaacactaaaaaaaaatcagtatgtttaaactattcgatttgattaaacgacactagttaaattctgtagggagaatcaattaaagctctatatatttttttactcggatgttttttactactactaaactattcactacttcatcttttgatatatttatgtatataactatgtaagagaaagccaccaaagcgaactactctataagatacatctatgagtacctatcgcatcccaacaaaccactcgatacaatacctccgatgaaaactcacctgcttagatgcgatattatcaaccaaactctcaagattcaaaactgatttcgaagtatctgcgctggaggaatacaataaatgaacgggatgtttgttaacacactaaacacgctgcagtagattcattgaacaatatttgatattatcagaaaatttaattgattttgattaaatgataaataaaggaaatcaataaaatattattatgtattc

SEQ ID NO: 106 - protein, 1307 aa, Drosophila melanogaster
  AAF49089
  GI:10733351
MVNHNAETAKTGNGTNATANLIVKADGNATQPKAMTSSAARMNDALSASLADLSEQENGTTAEDIHLNDLYTRYRQRLRKSLFRSGLLTSLLACVVSIIIGIVYGQHLVQTMLLVLAALISGSILTALQFPAVLSSPAAALAFAIVTTFSLGTIAAITGDELAPLPMYALFLCIHSMLPISWPVSVVLALFMTAIHIVYRIGTSPDYAPNLPMLFGEIVMLASASVSGLYYRIMSDAAHNRTVDGTRTGIEQRVKLECEREQQEQLLLSVIPAYIAAEVKRSIMLKMADACQRAGGQASTSATRFHELHVQRHTNVTILFADIVNFTPLSSSLTASDLVKTLNDLFGRFDQIAQENQCLRIKILGDCYYCVSGLPISRPQHATNCVNMGLQMIDAIRHVREATGINVDMRIGIHTGNVLCGVLGLRKWQFDVWSDDVTLANHMESGGVAGRVHITKQTLDFLGDKFEVEQGEGGNRDAYLADHKVESYLIVPPKPAYTYSVPRVVECIEQNDPSPTTEETKEIKETDQSHEATDVADVLLPVTVAPPPAIVDEKMSPTSINSQEAPLHAPLASAASMSIKELSEEEDEADEATAVTEPLMHRDQDGKNDKEPKANGGHRGSGDSAASESVAKSAALSLPADDLLSMSGSESGISNSGAQAQSSNPASVTPTAAAPAGGAASNSLTVAEAPERSRRKLSVQGLMSFADRRRSSGAFIEGRKLSIHSGESFRSHAGHVTRNRPSSKMTKYVECWGADRPFANIAESKLVKNIGLASIAMIESNLLPPERKCFNFNFFGPPTELKPFTMWYRNTPREAMYRAQPDTHFRFDLICAFVLFLSLAVVQLIVIELNLALLGSLLASFVSLALFLYLSNMSVPDVHASTTERNGPGQVVASSRYLRLAMFVVVNILISSCAVFSVINYTVPDGVSKEPSSNQTILESNFSSVFVNSTLEDVQLWEIDYAIPIAPVFLYCCAISLAAISAFLRSGFILKLIAMLVAVIAQVTVLGYSDLFEMYNDANITHGLPLEIKGFLLLLVIILVLHTLDRQGEYVARTDFLWKAKLKVEQEEVETMRGINKILLENILPAHVATHFLHLERSTELYHESYSCVAVMFASIPNYKEFYDETDVNKQGLECLRLLNEIICDFDKLLLKPKFSGIEKIKTIASTYMCASGLRPGKEDGATDEKRTEEHNVVILVEFAIALMSILDSINRESFQRFRLRIGLNHGPVIAGVIGAQKPQYDIWSNTVNVASRMDSCGVMGRLQTTENTAKILMTAGYECECRGLTYVKGKGNLVTYFVKTPFDGKL

SEQ ID NO: 107 - DNA, 1357 bp, Drosophila melanogaster
  Name: CG17010
  AE003635
  GI: 7297915
  Transcript: CT37753
atttttcccccaaccaaaatctctgttaagttttgttcaaaatttccggcttacgcagccctttcaaatgggaaagaagctggatgtggttgtcttcgggacggcaaacatcgaatatataacatatgtcccggaattgccgaaacccggtgaacttgtcgccggaacgtacatggagacctgtttcggtggcaagggagccaatcagtgtgtggcagctgccaaattgggggcctccaccgtcctggtcgccaagttgggcaaggacgaatcgggcgatgactacctaaaccacctgcaacagcacgaggttgatgtgacgcacgtccagcaggtggagaacaatcccacgggcatgagtgaaatcgcggtttctgagaatggagatcagtacaagatcaacgtggctggtgcgaatgtatttctcacggccaaggatgtgacccgggctaagaagtcctttcaggatgcgaaggtgcttctctgccaactggaaacggatatgaatgccaccatgtgtgcgttgcgtcagttcaagggggtttccctgctccacatgtcgccaatgcgaaaagatattccaaatgccatgattggcttgcctactattctggttgcgaatcaagaggcagctgccaacctaaccgatatggaagaagtgttaacccctgatcaggcgcgaaaagcagctgaaactcttatcgcaaagggagccaagagcgtgatcattaccatgggcgagcaaggagccgtttacatgtccaagaagagcaaagatatgtgcacccatgtgcccgcctccgatgtgccgcacttggccgatccctcgggtgccggtgatgcctttatgggcagcttggcctatcacatagctcgatttcccaaactgtccacagaacatcatatcagtgcggcacactcctgcgccgcctactccatgggccgccgcggcactcagccaagttttccgggcaaggaaagcgccaaaagtgacctatgctattcgacgcccacgtttagtgtcattccaccttctagtccgcaacatgaagatgataatatggtaacaaagacgccaccgccttcaatggtagtccctacgcccgaagaagcacactcccaaaaggaagttgtggaagaaccgcaaaaacctgcacctcctccaccggaggatccggttgtggaagcacctccaccaacgacctccgaggaacctccgaaagcagtggaaacctccaatgaacctccaaagcctgcggagaccactgatgaacctccaaagcctgcggagaccgcagatcaagctcctgtgaaacccgtggagactgctaatgagccacctgccaacaaagcataa

SEQ ID NO: 108 - protein, 429 aa, Drosophila melanogaster
  AAF53182
  GI:7297937
MGKKLDVVVFGTANIEYITYVPELPKPGELVAGTYMETCFGGKGANQCVAAAKLGASTVLVAKLGKDESGDDYLNHLQQHEVDVTHVQQVENNPTGMSEIAVSENGDQYKINVAGANVFLTAKDVTRAKKSFQDAKVLLCQLETDMNATMCALRQFKGVSLLHMSPMRKDIPNAMIGLPTILVANQEAAANLTDMEEVLTPDQARKAAETLIAKGAKSVIITMGEQGAVYMSKKSKDMCTHVPASDVPHLADPSGAGDAFMGSLAYHIARFPKLSTEHHISAAHSCAAYSMGRRGTQPSFPGKESAKSDLCYSTPTFSVIPPSSPQHEDDNMVTKTPPPSMVVPTPEEAHSQKEVVEEPQKPAPPPPEDPVVEAPPPTTSEEPPKAVETSNEPPKPAETTDEPPKPAETADQAPVKPVETANEPPANKA

SEQ ID NO: 109 - DNA, 3140 bp, Drosophila melanogaster
  Name: tkv
  AE003609
  GI: 7296952
  Transcript: CT33585
ccataatttacaccactcatgttacgctaaagttttattgagttccattaatttacgactttctatggtcgtaattaagattatcctttgctcgcgctccgcaattgccgccgattttccatgaatggcagctttttatcggacctgcactcgcataattcattttatcattttgacagattcggaatggaatagcgactttcctcgcccacccaacacgcgtacgagatttcaattgcccgtcgagtggcacacatatattataccagctctcgaaatgagacgcatcataaataataactaatgttttgataagaccccaatgagcgccaaccactttttctgtttatcaaattacgtatgaagtttgctcattaattttggcaaagtgagtgtaggggaaacatgggtagtgaattcagtgcgaatgttcagccagacgtcgaagctatggccgccgccgctttgagtggcatggaaatgggatctggaccaggatcagagggatatgaggatgccgacaacgagaaaagcaagaccgtggaaaatgcccgctccctaacctgctactgcgatggcagttgtccggacaatgtaagcaatggaacctgcgagaccagacccggtggcagttgcttcagcgcagtccaacagctttacgatgagacgaccgggatgtacgaggaggagcgtacatatggatgcatgcctcccgaagacaacggtggttttctcatgtgcaaggtagccgctgtaccccacctgcatggcaagaacattgtctgctgcgacaaggaggacttctgcaaccgtgacctgtaccccacctacacacccaagctgaccacaccagcgccggatttgcccgtgagcagcgagtccctacacacgctggccgtctttggctccatcatcatctccctgtccgtgtttatgctgatcgtggctagcttatgtttcacctacaagcgacgcgagaagctgcgcaagcagccacgtctcatcaactcaatgtgcaactcacagctgtcgcctttgtcacaactggtggaacagagttcgggctccggatcgggattaccattgctggtgcaaagaaccattgccaagcagattcagatggtgcgactggtgggcaaaggacgatatggcgaggtctggctggccaaatggcgcgatgagcgggtggccgtcaagaccttctttacgaccgaagaggcttcttggttccgcgagactgaaatctatcagacagtgctgatgcgacacgacaatatcttgggcttcattgccgccgatatcaagggtaatggtagctggacacagatgttgctgatcaccgactaccacgagatgggcagcctacacgattacctctcaatgtcggtgatcaatccgcagaagctgcaattgctggcgttttcgctggcctccggattggcccacctgcacgacgagattttcggaacccctggcaaaccagctatcgctcatcgcgatatcaagagcaagaacattttggtcaagcggaatgggcagtgcgctattgctgacttcgggctggcagtgaagtacaactcggaactggatgtcattcacattgcacagaatccacgtgtcggcactcgacgctacatggctccagaagtattgagtcagcagctggatcccaagcagtttgaagagttcaaacgggctgatatgtattcagtgggtctcgttctgtgggagatgacccgtcgctgctacacacccgtatcgggcaccaagacgaccacctgcgaggactacgccctgccctatcacgatgtggtgccctcggatcccacgttcgaggacatgcacgctgttgtgtgcgtaaagggtttccggccgccgataccatcacgctggcaggaggatgatgtactcgccaccgtatccaagatcatgcaggagtgctggcacccgaatcccaccgttcggctgactgccctgcgcgtaaagaagacgctggggcgactggaaacagactgtctaatcgatgtgcccattaagattgtctaagcagctgtttgtagtctcgttttaggtttaacctaagttgcatttagttttctgtttttgttcaacttctgttgaatacgcagttccgaccttttgtccggaaattcatagttaggttctaatcgtaagttgcttgtacgtgagcggagtaaagcagaggatccttcagaggtgcctatactacggttacttaaaccgtcgcactgattgtaagctagagtttagatataagttggcaggagctagttactaaggccccttgcaaaatctttggttagaaaaatgctttaactatttgagaaatatagggagtattttggatgacacctattcatgtcgatgtacataaatatgagatcaaaacaaaaaatcaatcgaaagaatcgaaatttatatgtaacatacattaatttttgtgccagcttttgtacgctttaactaaacgagttaagtcgcccattctttgacccccgaggctttagcctcaacatagaacatgtccttatatgttttgtttgtatctagtgtttaagtgtaaactttgcagactttgtgcaagtaaatgctgccttttgtaaaatccacggaattagttgccttaagacaaagtgtaaagacaggagccaacagacaggagcccgactcccttcctccccttttagtagcacatatttttgtatttataaccagagatatatagaactggcagttgcgtatctcgagaagtgcacttgtgtcggctcttttgttttgtgtaaatagcaaagatgtttataggccgctaaccatacatatatatagtatatatattatatattatcgttataagcgattctgtaaatactatatatgtatctttatctgtaaccgtttaacttatatcttatcgttcttatcatgtaaccttgtttaagctagagttagatgactagcctgtaagagcaacaagtaaactatatgaactagatggatatgtatctttcagttttttttctgtttcattattactgctcgcagaccacaagaactaaagttttgtattaaagcggttagttaatttatttaaaaataataaaaaattataattaaaccca

SEQ ID NO: 110 - protein, 575 aa, Drosophila melanogaster
  AAF52230
  GI:7296958
MRLQLVALELQATSGTADGLFEEIALEALTRSEFSANVQPDVEAMAAAALSGMEMGSGPGSEGYEDADNEKSKTVENARSLTCYCDGSCPDNVSNGTCETRPGGSCFSAVQQLYDETTGMYEEERTYGCMPPEDNGGFLMCKVAAVPHLHGKNIVCCDKEDFCNRDLYPTYTPKLTTPAPDLPVSSESLHTLAVFGSIIISLSVFMLIVASLCFTYKRREKLRKQPRLINSMCNSQLSPLSQLVEQSSGSGSGLPLLVQRTIAKQIQMVRLVGKGRYGEVWLAKWRDERVAVKTFFTTEEASWFRETEIYQTVLMRHDNILGFIAADIKGNGSWTQMLLITDYHEMGSLHDYLSMSVINPQKLQLLAFSLASGLAHLHDEIFGTPGKPAIAHRDIKSKNILVKRNGQCAIADFGLAVKYNSELDVIHIAQNPRVGTRRYMAPEVLSQQLDPKQFEEFKRADMYSVGLVLWEMTRRCYTPVSGTKTTTCEDYALPYHDVVPSDPTFEDMHAVVCVKGFRPPIPSRWQEDDVLATVSKIMQECWHPNPTVRLTALRVKKTLGRLETDCLIDVPIKIV

SEQ ID NO: 111 - DNA, 2583 bp, Drosophila melanogaster
  Name: dnt
  AE003662
  GI: 10728868
  Transcript: CT38779
aactcggccgggaaaagttgaaaaattattaacaagcagctgccagacagctaaaacagtcataaactgaagaaaacccgcggaaacaacgtttaaaatgaaatgtgcgtgaaaaaatagtcgaattgttatttataagaccaaaataaagtgaattgcccggttaaacaatgcttttaatgaaattttggtgctaaaacgacgccgtcgcactcgcactctcgctctttctctctcgcggcgtccgtgtctctctctccccccacccccgcgactttggattcgcttttgtgctggtcattcgttcgagattgtttacgaatagccgtgtgtgataagagtgcaaaaactggcaaacggaacagaatatctgatggaatctgtgaataaatgcggtaaaagcgcatccacaagaaattgtacggtgaaaatgagccggaaaatgtgggtgctttcgctgctggcgctggcagcgctacaactgcactcgggcagcgaagtggctgcacatttgaatgttttcctaaatcccgtggaagtaatgcgtttattaggcgtctctgctgaggtttactacgttcgcgaaggtcatataaataactacgctttgaacttcattgtaccagttccggcgaatgtcaaggacattagtttcacctggcagtcgctggcggggcgtggccttccctacagcatcaatgtggtcagctccgatcaggaagtgcttcctcgaccggcgatcaatgtgtcacacagtggggaaatccccacgaccatacaaacctggtccattgccctcaagtgcagcggattgaaagcggcggaggtggatgtgactgtcagcctggaagtggtgctcaaccggtcactgaacaatgtaactcatctggtgtttcggaggaagaagatctgtcttatgaatgacagtgccgaggatttgtcggaggatgtggacgatccccagttgctggagaccgtaatgttaccacccactggattgatcaccctggtcgttggtgtttctgtggccatgggatctgtgtgcctgctcctcatgattgcctattgcgtcaagggagcagccaacaagaggcagcatcatcaacacggaggacagcccatgaggacttcgagctttcagagactaaatacccatccgccctgccagtcttccatgggatcggctgcttatatgacgccttcgattatagctccaattcatggctcctccttgccacggaaagttccagtttccgtagagcagcaacatccggaggagcttcatcgccgaatttccgagttgaccgtggagcgctgcagggtacgactatcgagtctcctgcaggaaggaacgtttggacgagtttatcgtggcacctacaacgacactcaggatgttctggtcaaaacggtggcccagcatgctagccaaatgcaggtgcttctccttctccaggaaggaatgctgctctatggcgcctctcaccctggaattctctcggttctcggcgtttccattgaggatcacaccacaccgtttgtcctctatcccgctctgaacaatacccgcaacttaaagcaattcctgctggatccagcttgtgctcgcactgtgaccaccatccaaattgtgatgatggcctcgcaactgtccatggcattggatcatctgcacagccatggagtggtgcataaggatattgccacaaggaactgcgttattgacgatcagctgagggtgaagctctccgatagctccctgtcccgcgatctcttcccctcggactacaactgcctgggggacagcgaaaacaggccagttaagtggatgtccctggaggcactgcagcacaaacagttctccgaggccagcgattcgtgggccttcggagttctgatgtgggagttgtgcacctccgctaagcaaccctacgccgaggtggatcctttcgagatggagcactatctcaaggacgggtatcgtctggcccagcccttcaactgccccgatgagctgtttacgatcatggcctattgttgggccctgttacctgccgagcggccgaccttcgcccagctgcagtcttgtctctccgaattctattcacaaatcacgcgctatgtctaggacaaaggtcatcaatgtcatccgcatgggaatcggctcttttgaagagttaaggagtttaggcttagttgaataaagtcctctagcttactccactttgttatgacaagatttgccaaatcgaatgtttagcccttccttggtccagcatctgtacatatagtttacacattcagctctttaagtaactatctttaagcttactctacgataaactcaactcttaccacttagatgaaatacatagttcagcttgcacagttctccttgtaatccatcaacactagctaaaacaaaggccgaaatcaaatatagtgatatttataaatagagatagcgatgtctataagattacacatacatatttatgatgcatataatacatgttgtatgtttagcatttttgacaatttaccgtttatacgagagatcaaacatgatatacaaatatatac

SEQ ID NO: 112 - protein, 584 aa, Drosophila melanogaster
  AAF53783
  GI:7298565
MESVNKCGKSASTRNCTVKMSRKMWVLSLLALAALQLHSGSEVAAHLNVFLNPVEVMRLLGVSAEVYYVREGHINNYALNFIVPVPANVKDISFTWQSLAGRGLPYSINVVSSDQEVLPRPAINVSHSGEIPTTIQTWSIALKCSGLKAAEVDVTVSLEVVLNRSLNNVTHLVFRRKKICLMNDSAEDLSEDVDDPQLLETVMLPPTGLITLVVGVSVAMGSVCLLLMIAYCVKGAANKRQHHQHGGQPMRTSSFQRLNTHPPCQSSMGSAAYMTPSIIAPIHGSSLPRKVPVSVEQQHPEELHRRISELTVERCRVRLSSLLQEGTFGRVYRGTYNDTQDVLVKTVAQHASQMQVLLLLQEGMLLYGASHPGILSVLGVSIEDHTTPFVLYPALNNTRNLKQFLLDPACARTVTTIQIVMMASQLSMALDHLHSHGVVHKDIATRNCVIDDQLRVKLSDSSLSRDLFPSDYNCLGDSENRPVKWMSLEALQHKQFSEASDSWAFGVLMWELCTSAKQPYAEVDPFEMEHYLKDGYRLAQPFNCPDELFTIMAYCWALLPAERPTFAQLQSCLSEFYSQITRYV

SEQ ID NO: 113 - DNA, 4148 bp, Drosophila melanogaster
  Name: ACXD
  AE003474
  GI: 10727242
  Transcript: CT6304
ggttggagtcggtcgcgtgtgttgatagcagctccggcgggcaattaagtcggacggaatcgaatcggggcgagcgcttatcgcggcaaaagagtaatttgtgatacctgtccgccgtgtattggcttgttggagcgcaacgcgcttaagtggtgttaattttttattaattattatcgtatttattacccaacgaaagtgaagtgcgaaatcggtcgcctcaagtgcccggccgtacgtgcaaagcccgtaaataaattacacagccatatagccctgatccttacctctacactcgctctcgcccaccgcagctgataatgcagacgaattccgcctgatcgattcccattcccatttcgattgcgatttggagtgcgagtgcgggcgaaataggcagccagcctctgattctgagtagctgccaccgaaaatgagcccgccacattgatcatctgatctcccatccacccaatccaatctgaactgaactgaactggcgccatcatggactcctacttcgactcggccatcgagtacaatcgatccaaccccatcagcctggccaggaccagcagccaggcccaaaccgtgcagaacgagaagaactgggagtggtcgtaccttgtgagaaaatgtcgcaacctggagctggaggactcgtacgacctatacatgcgtcgcctgcgcgtcggctacctgtcgctgttcatcttcatccacgtggcggtgacggtgatccacacgctgctgctgctgaccacgccggagatcaagtacgtgtacgtggacatggtggcctacatgtgctccggcctggtcatctgggtggtgctgggcgtgaactttcgcagcgagctggtgagcaagcacggctgggtggtctacgccacctcctggctggcggtgtgtgtaatggtcctgatggacatcggactgaatgtttaccacgccaccagccacaacgacatcctgaatccgatctacgatgcgtatacgctgtacgccatatacatgttcatgccggtgccgtacctgctgcagccgtttgtccttggatcggcagtcaccttttgctacataataaactacagcttcgtgatcaccgccaaggatgacaaccaaatgcacagcatcctgaacgaggccatatacctgagctgtgtcaacctactgggcattttctttcgcctgatgagggatatagcgctacgcaccaccttcctcgatcgccggcagtatgtggaggagaatctcctgttgcgctatgccagggatcaggagcggagtctcttgcttagcatcctgcctgcccagatcgccgatcggctgcaggaggatgtgaagaaccgcatcgagcgatccaagcagcagcaccagcagcagtcgcaggtggatctgcgcaggagtgcggatagccagacccttaaaaggtggcgacaaccggaccatggcaccctcttcattgagccccacgaagatgtcaccgtcctctacgcggatgtggtcaactacacccacttgaccaccaccctggatgtgaagaagctagtggaggctctgcacgatctcttcgtgcgtttcgacattgccagcgaggagtacaacgtgctgaggatcaagttcctgggcgattgctactactgcgtggctgggctggccaatcccaatgcggatcacgccaagtgctgcgtggatctgggactgcgtatgatcaaggacattcgagatgtcagagagaagcgccatctgaatatcgacatgcgaatcggcgtccactcgggcgatgtcctatccggcgtaattggagccgccaagtggcagtttgacatatggtcgaaggacgtggatattgccaatcgcctggaggccactggagccacaggacgagtgcatgtgagccagaagaccctatccctgctggatggcgagtacttcttcgaggacggcaccgaaaaggctcgagaggatccggtgctgcagaagcacggcattcgcaccttccttatcaagtcactgcgcgcccccatgcatgacccgcgtcgcaggatgagggagcggcaggtgaagaagctgagcgaggccagcaaggccaactttatgcacaactccacgctccaccagtacaaccaggtgcgcaaccaggccaagctggagatgtgtcgcgagctggacaagatgcccatcggcaggatacagctcaccaaagtcttccggcgaagcactcggctcacccaggacgaaatcgaagaagagacctttcgacgcaacatcagctcctgctgtctgttctttcgcatccgcaactgggagttccagtatatcaaggagccggatgtgatgctcaagtacagcattgctttggcttgggtcatttacatgggtctgctgaccatccagctgctgagcaaggatgctcgctatcactactggtacatagatggcaccacgattatcctgctcaccatgctgctgatcgtgtcctggtacaagaagctctggatcatgtacatgtccgatgcggatgtgtcctcgccgaacggccggctcagtggcttcctcttccgcatgtcggatgagatgcagcgcaatgtggtcatccgggtggtgatgtacttcctgatcatcttctcctattgcgcggtggccattatgcaagtggtgggatgcagcagtgacgaggactacgcggatctggatccgacctacgacgagcgggttcagtgctttcatccttggatactcaccaattgcatgaccctggtaattggcatgtccttcctcttcacgcgaatccccttcatcatcaagtcctgcttctctgctttgataatgatcggctacgcggtgctggtggtgtccgagttcaacttcatctacgccaacagcccctccaccaatgtgaacttcaacgccaagtactcgcatatcctgctgatgatcataacgttcggcatttttcacttgatggagcggcagacggagttcattgccaaagtggattacaactggaaacggcagctaattaagaagcaggaggacgccctgatcaccaatgacaccattaaagtgctcctcaccaatattctgcccacacatgttggtaagtttgccaagtggccagctggtgacatactaactccatccgcccatccagccgacttctatctgtcgaatcaactgcagaacgagctctactacgaggagtacgataatgtggccgtgatgttcgcctcgatcaaaaacttcgacaccgacaagatcggactgcgggtgctcaatgagattatctgcgactttgacgatgtgttgaacaagtactcgcagagtctgcgcgtggagaagatcaaggtggccaactggacgtacatggcggcctgtggcctagacgtctctcgttcggagcaggtgaacgccccgcagatgaagttccgcaacgtttccctcatgcccaacgggcgcaggagtcgctacgacggagcacgaagctccaatgcggacggagtgcagcgggtgccgtacggaaacggcagcaacatagccctggatctcgacttggagcggggtcagtacgagggcaacgtgatcaccagcgggccgcgcatcagtagcacccacaacgggagcagcagcaacgaggtggtgcgcgtgatggccgagttcgccctggacctgatgcgcacgatgcgccgcttcaacacggagaacatgcagacggagtacgagggcagcaccgactacggcatgctgaggatcggcatctcgcacggcagggccatggccggggtggtgggcatctcgaagccccactatgacatctggggcaatcccgtgaacatggcctcgcgcatggactccaccggcgtgcccggccagattcaggtcaccgagaacacggcgcttaagctgcgcgagtttaacattcagtgcaactaccgcggcatgaccttcgtcaaggggcgtggcaacattcccacctacatcatcggcatcgacagcgaataccagttcctgccacatcgcccggccgcgccaaccaaagaagactagctgaaatttaccagagattagatttaggacatgcatgtatgtaaatatagagtataataggtttaggacagtcgcaaataaaagctgtaattcgaact

SEQ ID NO: 114 - protein, 1162 aa, Drosophila melanogaster
  AAF47621
  GI:7292211
MDSYFDSAIEYNRSNPISLARTSSQAQTVQNEKNWEWSYLVRKCRNLELEDSYDLYMRRLRVGYLSLFIFIHVAVTVIHTLLLLTTPEIKYVYVDMVAYMCSGLVIWVVLGVNFRSELVSKHGWVVYATSWLAVCVMVLMDIGLNVYHATSHNDILNPIYDAYTLYAIYMFMPVPYLLQPFVLGSAVTFCYIINYSFVITAKDDNQMHSILNEAIYLSCVNLLGIFFRLMRDIALRTTFLDRRQYVEENLLLRYARDQERSLLLSILPAQIADRLQEDVKNRIERSKQQHQQQSQVDLRRSADSQTLKRWRQPDHGTLFIEPHEDVTVLYADVVNYTHLTTTLDVKKLVEALHDLFVRFDIASEEYNVLRIKFLGDCYYCVAGLANPNADHAKCCVDLGLRMIKDIRDVREKRHLNIDMRIGVHSGDVLSGVIGAAKWQFDIWSKDVDIANRLEATGATGRVHVSQKTLSLLDGEYFFEDGTEKAREDPVLQKHGIRTFLIKSLRAPMHDPRRRMRERQVKKLSEASKANFMHNSTLHQYNQVRNQAKLEMCRELDKMPIGRIQLTKVFRRSTRLTQDEIEEETFRRNISSCCLFFRIRNWEFQYIKEPDVMLKYSIALAWVIYMGLLTIQLLSKDARYHYWYIDGTTIILLTMLLIVSWYKKLWIMYMSDADVSSPNGRLSGFLFRMSDEMQRNVVIRVVMYFLIIFSYCAVAIMQVVGCSSDEDYADLDPTYDERVQCFHPWILTNCMTLVIGMSFLFTRIPFIIKSCFSALIMIGYAVLVVSEFNFIYANSPSTNVNFNAKYSHILLMIITFGIFHLMERQTEFIAKVDYNWKRQLIKKQEDALITNDTIKVLLTNILPTHVADFYLSNQLQNELYYEEYDNVAVMFASIKNFDTDKIGLRVLNEIICDFDDVLNKYSQSLRVEKIKVANWTYMAACGLDVSRSEQVNAPQMKFRNVSLMPNGRRSRYDGARSSNADGVQRVPYGNGSNIALDLDLERGQYEGNVITSGPRISSTHNGSSSNEVVRVMAEFALDLMRTMRRFNTENMQTEYEGSTDYGMLRIGISHGRAMAGVVGISKPHYDIWGNPVNMASRMDSTGVPGQIQVTENTALKLREFNIQCNYRGMTFVKGRGNIPTYIIGIDSEYQFLPHRPAAPTKED

SEQ ID NO: 115 - DNA, 3187 bp, Drosophila melanogaster
  Name: Aats-ala-m
  AE003567
  GI: 10728137
  Transcript: CT14952
ttatctcgagcatttttaattgccggtgcggttttaattgaactgcggcatgtacaactcggccaagcagctgcagcgcgtgctgacagcgcgcgagattcgtaaaacctttttggatcatttcaccgtcaatcatggccacaagttcgttcgctccagcccggtggtgcccttttgcgatcccactgtggctttcgttaacgcgggcatgaatcagttcaagtcggtgttcctgggcacagcagcggcgccacacaagcgggttgtcaactcccagaagtgcgtccgcgttgggggaaagcacaatgatctctccgtggtgggcacggatggctatcatcacacgttctttgagatgctgggcaactggtcctttggggattacttcaagcgggaggcgtgtgcaatggccctggagctgctccgtggtccctacaacattgatccaggtcgtctatacgtcacatactttgctggcgacaaggtgctgggcattccagccgatctggagtgtttcgagatctggaggagcctgggctttcccgcctcgcgaatactgccctttggctgcgccgacaatttttgggaaatgggcgctacagggccgtgtggtccctgcaccgaaatccacatagatcatcgcccggatttgggcagcgtggagcagcgagccaagttggtgaacgcaggtcgttccgatctcacagagctttggaatcttgtctttatacagtacaatcgtcatgccgatggcagcatctctcaattgcccgctcatcatgtggacaccggcatgggttttgagcggctaacggctgtgcttcagaataagtcttctaactatgatacggacttgttcacgccgatatttgatggcatccagcaggcggccaagactccggtttacagtggcagctttccggatggtggaaatgcagcagtactcgacaccagctataggatactagccgatcatgcacgcatggtgaccgcctgtttggccgacggcatgcttccagatcaaaatcagaaattgcgtcgcgtgctgcgcaaagctctcaacatttcggagcatgtgtttgcccacgacaaattgctgacccagctagttcctattgtggtggagacacttggtgaagcctatccagagatggcggctaagcagcaggctgttatcgacttgatctgccacgagcaggaggtctacaagaatctaagagagagttcttccaaagcgtttgcagaggtgcttatggagtttcccaatctggatgacatcgatctgatggagtgcccgggattcgtgcccgcctatcgagagttgcagatgcagcgctgcaagttttccaataacacaataccaggggacttcctttacaagctgaccgatacctacggcctgaccgaggagagtttcctcaagctggctgaattggagaacatgaactgtgatttggagcgctacagggcggaggtcagtctggcgaagctcaaagccaagggcaaccaaagggagactgctggaggatcactctgcgatctggccacggagcagcgtattgctgaagctcaggcgatgctaacgaagcgtctgacacccaccgacaacagtcacaagtacacctactccttcgacaaggagagtgattcataccaaatacccccactaaagactcgagtcctcggaatgctcctcaacgatgcggaagtgtcacgaacccaaggcagtcgcatacagcaacccttcaccgaccttatttccattgtgaccgctggcagcaatttctactatgaatccggaggtcaacaatcggatggcggaaagatccttgtgagcaatcaccaacagccagaccatcctcattcactagacgtaatcggtgtaaagcatctcaacgattgcgtagttcacatctgcaagttatccagtcccaccgacgcctttcagctggccattggggatgaggtggagctgcaggtggatgcgcagcagagacagctcaacacgtgccatcacacagccacgcatctactaaacgccgccatccgatcgcttttcaagaaggtcacctaccaggtctccagttctgtgagcagcgatcagtgcaagctggagctgggactcctgggcaagcgcattcaaaagaccgatgtacagctcatcgaggatctgatcaatcgcgttatctgctctgctgcgccggttgaagttcaattgctgagtgcagctgaagttctggagcagaatgacatcacaatggtgcccggcgaggtttatcctgagcagggattgcgtctagtcaacgtggagagtcctgaactgcagctgagctccaaggaactgtgctgcggaacgcatgcaaccaacaccagtgagctttcgtgcttctgcatcgtgaatctcaagcaaaccaatcgtgcgagattcgcatttaccgccgttgctggccaggcggcggaaaatgtgctgaaaacggctgccctgctgcgacaccgcgttgatctcctcgagaagcagttccaaactgacaaactcacaaacgctacggaggcggaactgcagacgattcggcacaacatgttgcacacggacattaaactgccatacgcttttaagatggacacgctggaacgcatcaccgagatgctgaagagaataaaagattcatcgcgcacaaccttaaaagaatttgtggacgtagagatgcgcacgctgctgcaggagaagccgttggacacacaccccttcattctgcactacatcaccagttccgcgctcgtggaggagattcctttgcaacgagccaccaagctgtgcccggatcggcccatcctcgtaatcagcgtgtgtgatagcgtggtcaaggctcgctgttgtgtaccagaaaagtgtatcacggagaaattcaacgcttccgcctggctgcaatcctttgccgacacctttaatggacaaatagccgcgcccaagggccaaaatccgcaggccgtgtgcaacatgaagggtcgacgggtgagcaatctgttcgaggaacagttggagcaggcaatgtccaaggcacatgcatacgctaagctttatctataggtataagttgtgattaccctccaaaatgtgctagctgtaagcttgccctttgaataattgctcatgtgaggagcgagtaaatggcgaagttttaaggaa

SEQ ID NO: 116 - protein, 1012 aa, Drosophila melanogaster
  AAF50804
  GI:7295490
MYNSAKQLQRVLTAREIRKTFLDHFTVNHGHKFVRSSPVVPFCDPTVAFVNAGMNQFKSVFLGTAAAPHKRVVNSQKCVRVGGKHNDLSVVGTDGYHHTFFEMLGNWSFGDYFKREACAMALELLRGPYNIDPGRLYVTYFAGDKVLGIPADLECFEIWRSLGFPASRILPFGCADNFWEMGATGPCGPCTEIHIDHRPDLGSVEQRAKLVNAGRSDLTELWNLVFIQYNRHADGSISQLPAHHVDTGMGFERLTAVLQNKSSNYDTDLFTPIFDGIQQAAKTPVYSGSFPDGGNAAVLDTSYRILADHARMVTACLADGMLPDQNQKLRRVLRKALNISEHVFAHDKLLTQLVPIVVETLGEAYPEMAAKQQAVIDLICHEQEVYKNLRESSSKAFAEVLMEFPNLDDIDLMECPGFVPAYRELQMQRCKFSNNTIPGDFLYKLTDTYGLTEESFLKLAELENMNCDLERYRAEVSLAKLKAKGNQRETAGGSLCDLATEQRIAEAQAMLTKRLTPTDNSHKYTYSFDKESDSYQIPPLKTRVLGMLLNDAEVSRTQGSRIQQPFTDLISIVTAGSNFYYESGGQQSDGGKILVSNHQQPDHPHSLDVIGVKHLNDCVVHICKLSSPTDAFQLAIGDEVELQVDAQQRQLNTCHHTATHLLNAAIRSLFKKVTYQVSSSVSSDQCKLELGLLGKRIQKTDVQLIEDLINRVICSAAPVEVQLLSAAEVLEQNDITMVPGEVYPEQGLRLVNVESPELQLSSKELCCGTHATNTSELSCFCIVNLKQTNRARFAFTAVAGQAAENVLKTAALLRHRVDLLEKQFQTDKLTNATEAELQTIRHNMLHTDIKLPYAFKMDTLERITEMLKRIKDSSRTTLKEFVDVEMRTLLQEKPLDTHPFILHYITSSALVEEIPLQRATKLCPDRPILVISVCDSVVKARCCVPEKCITEKFNASAWLQSFADTFNGQIAAPKGQNPQAVCNMKGRRVSNLFEEQLEQAMSKAHAYAKLYL

SEQ ID NO: 117 - DNA, 5091 bp, Drosophila melanogaster
  Name: gek
  AE003463
  GI: 7291737
  Transcript: CT13314
aaacggaacactacaattcgacaacagttcggcttttctttttgcactatttcggataaatatggtttaggccagacggagcaataactaagatggaatacgaatcttccgaaatcagtgatataaccacaggaagctgcaagaaaaggctcacatttctgaaatgtattctaagcgacaccacaagcgatcaaaaatgggcggccgagttcggcgaggacacggaaggacatcagttttcgttggactatctgctggacaccttcatcgttctctatgacgagtgcagcaactcctccctgcgcagggagaagggcgtctctgatttcctcaaactatccaaacccttcgtgcacatagtgcgaaagcttcgactaagccgagatgactttgacatactcaagatcatcggacgcggtgcctttggagaagtgtgcgtggttcagatgatatccaccgaaaaggtgtatgccatgaagattctgaacaagtgggagatgctgaagagggccgagacggcctgcttccgcgaggagcgggatgtgttggttttcggcgaccggcagtggatcaccaaccttcactatgcctttcaagacaatattaacctgtatctggtgatggactattactgcggcggagacctgcttacattgctcagcaaattcgaggacaagctgcccgaggacatggccaagttctacatcacagagatgatcctggcaatcaatagtattcaccagattaggtacgttcacagggacatcaagccggataatgtactgctcgataagcgcggtcacgtgcgcctggctgactttggatcctgcctgcgcctggacaaggatggcaccgtacagtccaacgtggccgtgggcacacccgactacatttccccggaaattttgagggccatggaggacggaaagggacgctacggcacggagtgtgattggtggtcactcggagtgtgcatgtacgagatgctctacggagagacgcccttctacgcagaaagtttggtggaaacctatggcaagatcatgaaccaccaaaactgtttcaacttaccgtcacaagaaaccctaaattacaaggtatcggagacgtctcaggacttgctctgcaaactgatatgtattcccgagaaccgacttggtcagaacggcatccaagacttcatggaccacccctggtttgtgggcatcgactggaagaacataaggcagggaccagcaccgtatgtgccggaagtgtccagtccaacagatacctccaacttcgatgtggacgacaatgacgtccggttaacggactccattccgccgtcagccaatcctgccttctctggatttcacttgcccttcatcgggtttaccttctcgctgaccagcagctccaccttggactcgaagaagaaccagagctcgggcttcggagatgataccttggacaccataagcagtccccagttggccattctgccgagcaacaactcggagacaccggtggactccgttcagctgaaggcactaaacgatcagcttgcggctttgaagcaggaaaaggcagagttgtcaaagcaacacaacgaggttttcgaacggctcaaaactcaagactctgaacttcaggacgccatctctcaacgaaacatcgccatgatggagtactcggaggtcactgagaaactctcggagctgcgaaatcagaagcagaagctctcccgccaagtcagggacaaggaggaggagcttgatggtgccatgcagaagaacgacagcctgcggaacgaactgagaaagtcggacaaaacgcgaagggaattggagcttcacattgaggatgctgtcatcgaggctgccaaagaaaagaagctgcgggagcatgcggaggactgctgcaggcagctgcagatggagctgcggaagggctcctcgagtgtggagacaactatgccactcagcatttcctccgagatgtcgtcatacgagatcgaacgccttgaactccagttctcggaaaagctaagtcatcagcagacgcgccacaatatggagttggaagcactgcgcgagcagttcagcgagctagagaacgcgaatttggcactcaccaaggagttgcaacaaacacaggaaaggctgaagtacactcaaatggagtcgattaccgattccgccgaaacgcttttggaattgaagaagcagcatgatttggagaaaagctcatggttcgaggaaaagcagagattaagctccgaggtgaatctcaagtcaaagagtcttaaagaacttcaagcggaggacgacgagatcttcaaggagttgcgaatgaaacgggaggccatcaccttgtgggagcggcaaatggcggagattattcaatgggtgtccgatgagaaagacgcgcgaggctacttgcaggccttggccaccaaaatgacggaggagttggagtatctgaagcatgtgggtaccttcaacaacaacggtgtggacaataagaactggaggaaccggcgctctcagaagctggacaagatggagctgctcaacctgcagagcgcgctgcaaagggagattcaggccaagaacatgatatcggatgagctgagtcaaaccagatcggacctcatatccacacagaaagaggttcgagactacaaaaagcggtacgactccatactgcacgatttccagaagaaggaaaccgaactgcgggacttgcagaagggaggcttggaatactccgagtcgttcctcaacaaatcaacgcatcatgggctaagcagcgccttcttccgcgacatgtcaaagaactccgagattatagattctgccgagagctttggcaacgaatccggcgacaatttcactcccaacttcttccagtccggcaattcgggcatgctcttcaactacgagccaaagtatgcgggtaagaacaacaaggatcattcgtccatgaaagaagcctcggtcagcgatttgtcccgcgaggagagtgaccagctggtcaaggaatctcagaagaaagtgcccggcaacacggcgatccatcagttcctggtgcgcacattcagtagtcccacaaaatgcaatcactgcacatcgctgatggtggggctcacacgacaaggcgttgtgtgcgagatctgcggattcgcctgtcacacgatctgctgccaaaaggtgcccaccacgtgccccgtgcccatggatcagacgaaacggccgctgggaatcgatcccaccaggggaatcggcacggcatacgagggctacgtaaaggtccccaagtcgggggtgattaagcgaggatggattcggcagttcgtagttgtttgcgactttaagttgttcctctatgacatttcgccggatcggtgtgcattgcccagcgtgagcgtgtcccaagtgctggatatgagggatcccgagttctcggtgggtagtgtgcgcgaaagcgatgtcatccatgccgccaagaaagatgtgccatgtattttcaagataaaaaccgcccttatcgatggcggtctttcgctgaacacccttatgctcgccgacaacgagtcggagaagtccaagtgggtcattgccctgggagaactacatcgaatattgaaacgaaacagcttaccaaatactgctatatttaaagttaacgagattctggacaataccctgtctttaataagaaacgcattgtgttctgtcatcatatatccaaatcaaatactcttgggcaccgaagacggcctgttctacattaatctggaccagtacgagatcgctcgtattggcgaaagcaagaagattcttcagctatggtacattgaagaggagcagatcctcgtcattctctgcggaaagcagcgcaacttgcgtttattacctataagggcattagaggctagtgatgtcgagtggatcaaggtggtcgaatcgaagaactgcatatctgcttgcactggaataatccgccgcttccccaatatcgtttactcatttatcatcgctctaaagcggccgaataaccacacacaaatcgtagtttacgaaatcaatagaacgcgcacaagacaccagaagacttgcgaattcacaattggctacatggcgcagcacctgcagattctgtccgacatgcgattggttgtggctcaccaaagcggatttaccgcatactttctgcgcggagaagcaactgcaatgtctttggttcatccggagaaccagttatgtgcatttttgaactactccggagtggatgcggtcagggtcattgaaattctgtgccccagcggcggcaatttcggggagtacttactggtgttccagactctggccatatacgtagacctgcaagggcgaaagtctcgggatagggaaattatgtatccagccttccctacgtatataaccttttgtgatggtcacttgctggtgttttcggatacacatttggatatattcaatacgcagactgccgaatgggtgcagtcgattggattgaagcaatcacttcccttaaacaatttgggaaacgtggtgctgtcctcagtcaatgacactccgctgattgtttacctatccaatattcacacaaagggccttttgcaataccgtgacggaaatcgaaagggacttccgagcataaagcggagattctctatcagggagataaacaagaccatcaaaagtgatcgtagatcaaagatgatatcagcaccgactaatttcaaccacatttctcacatggggccaggggatggcattcaaaatcaacgactcctagacttaccaaccacgctcgaaacagccgatcaagcctgcagtccaataatacattcgctgagttgcataccccagagtagaaaatccaattttctagaacaagtggatgcaaactccgatgactatggcaatgacaacattatctccagaacgcccagtccaatggcatcgtccttcatggacggcttaagcaataatgattaacttcagtcaatctctacacgtgtaatttaatcgattttttaagataactgtttgtaataaacatatttaatttctcgaatatcaa

SEQ ID NO: 118 - protein, 1637 aa, Drosophila melanogaster
  AAF47163
  GI:7291742
MEYESSEISDITTGSCKKRLTFLKCILSDTTSDQKWAAEFGEDTEGHQFSLDYLLDTFIVLYDECSNSSLRREKGVSDFLKLSKPFVHIVRKLRLSRDDFDILKIIGRGAFGEVCVVQMISTEKVYAMKILNKWEMLKRAETACFREERDVLVFGDRQWITNLHYAFQDNINLYLVMDYYCGGDLLTLLSKFEDKLPEDMAKFYITEMILAINSIHQIRYVHRDIKPDNVLLDKRGHVRLADFGSCLRLDKDGTVQSNVAVGTPDYISPEILRAMEDGKGRYGTECDWWSLGVCMYEMLYGETPFYAESLVETYGKIMNHQNCFNLPSQETLNYKVSETSQDLLCKLICIPENRLGQNGIQDFMDHPWFVGIDWKNIRQGPAPYVPEVSSPTDTSNFDVDDNDVRLTDSIPPSANPAFSGFHLPFIGFTFSLTSSSTLDSKKNQSSGFGDDTLDTISSPQLAILPSNNSETPVDSVQLKALNDQLAALKQEKAELSKQHNEVFERLKTQDSELQDAISQRNIAMMEYSEVTEKLSELRNQKQKLSRQVRDKEEELDGAMQKNDSLRNELRKSDKTRRELELHIEDAVIEAAKEKKLREHAEDCCRQLQMELRKGSSSVETTMPLSISSEMSSYEIERLELQFSEKLSHQQTRHNMELEALREQFSELENANLALTKELQQTQERLKYTQMESITDSAETLLELKKQHDLEKSSWFEEKQRLSSEVNLKSKSLKELQAEDDEIFKELRMKREAITLWERQMAEIIQWVSDEKDARGYLQALATKMTEELEYLKHVGTFNNNGVDNKNWRNRRSQKLDKMELLNLQSALQREIQAKNMISDELSQTRSDLISTQKEVRDYKKRYDSILHDFQKKETELRDLQKGGLEYSESFLNKSTHHGLSSAFFRDMSKNSEIIDSAESFGNESGDNFTPNFFQSGNSGMLFNYEPKYAGKNNKDHSSMKEASVSDLSREESDQLVKESQKKVPGNTAIHQFLVRTFSSPTKCNHCTSLMVGLTRQGVVCEICGFACHTICCQKVPTTCPVPMDQTKRPLGIDPTRGIGTAYEGYVKVPKSGVIKRGWIRQFVVVCDFKLFLYDISPDRCALPSVSVSQVLDMRDPEFSVGSVRESDVIHAAKKDVPCIFKIKTALIDGGLSLNTLMLADNESEKSKWVIALGELHRILKRNSLPNTAIFKVNEILDNTLSLIRNALCSVIIYPNQILLGTEDGLFYINLDQYEIARIGESKKILQLWYIEEEQILVILCGKQRNLRLLPIRALEASDVEWIKVVESKNCISACTGIIRRFPNIVYSFIIALKRPNNHTQIVVYEINRTRTRHQKTCEFTIGYMAQHLQILSDMRLVVAHQSGFTAYFLRGEATAMSLVHPENQLCAFLNYSGVDAVRVIEILCPSGGNFGEYLLVFQTLAIYVDLQGRKSRDREIMYPAFPTYITFCDGHLLVFSDTHLDIFNTQTAEWVQSIGLKQSLPLNNLGNVVLSSVNDTPLIVYLSNIHTKGLLQYRDGNRKGLPSIKRRFSIREINKTIKSDRRSKMISAPTNFNHISHMGPGDGIQNQRLLDLPTTLETADQACSPIIHSLSCIPQSRKSNFLEQVDANSDDYGNDNIISRTPSPMASSFMDGLSNND

SEQ ID NO: 119 - DNA, 3231 bp, Drosophila melanogaster
  Name: CG3216
  AE003452
  GI: 10726992
  Transcript: CT10631
atgcatctgcttgggatcagcatccacttcttcttcctgatgtacgtcaactgctttagtgcccatccgaatcccaggcgcaatgatataacctgggatgatctgaacaaggatattagtttggactccactacttccttggcggggctcaatgccagtgatgcgggcctagagcaaagaatgtacgagaggagcagggaatccaagtctacgcagctttctagatacactgaggtgggcgaaatgggctccacaatgcgtgtctataacgttggcgttctgatggcttctcatttggattctccattcgatctggagcgttgtggaccggccgttgacttggccttggatgagattaacaaggttttcctgaagcctcacaacataacactactgaaaaagaagggaagctatccatcctgttcgggtgctcgggctcctggactggctgcggacatgtacttccaggacgacgtaatcgcgtttattggaccagcctgcgcctttgcccttgagccggtggcacgtttggccgcctattggaacaagcccatcatcaccggcatgggagatcagccgccttcctcggaaggtgagctgacggtcacttccggaatcctgggaaggatacacaagtggaagaatgagaatacgggcatgttcaaggacaagtccaagtacccgacgctcacccggatgtcctactgccagtgccgcctcatcctggtctttgccagcgtcattcggcagttcaactggaatcacgttgccctgctggtggacagatcggagctcttctcgtggacggtgggcaagaatctggagtacggtctgcggcaggagggactcttgagcttcgtcaaggagctcaacggcaacgaggaggaggtgtacgaaaactatctaaaggacgccagcatgtatgccagagtggtcatcctgtcggttcgcggcgttcttgtgcgaaaattcatgttggcagcccacagcctgggcatgaccaatggcgagtgggtgttcctggacgtggaaatctttcagagcgaatactggggcgacaagggttgggagatgaaggatgagcacgatgccaaggcgcggaaggcatacgaagccctcctgagagtcagtctcctgcagccgacaagtcccaagttccaggactttgccgacaatgtgagggagaatgcgctctacgattacaactacacgtttggcgagggcgaggaggtgaacttctttattggagccttctacgatggcgtctacctgctgggaatggccttgaacgagaccctcaccgagggtggtgacatccgggatggggtcaacatcaccaggcggatgtggaatcgcaccttcgaaggtatcacggggcacgtgcgcatcgacgacaacggtgaccgggatgctgattactccattctcgatctggatcccatcaatggaaagttctccgttgtggcccattattccggtgttcacaagcagatgaagctcagcaaggagctgaataatatgtcctggcgcgtacgacccgatgatgtcctcatcgagatgggcggcatgtttggttcgaagggaggcttgcagcgcctggatgtggagaacatatcgctgcagcagttcggtatccattcgggacgcgcatcgatagccagcttcacgtcgctgccgccgcaagtgtacaccaccattggccagttcaagggcgaacgggtggccatcaagaaggtgaacgtgaagaaggtggacctgacgccgcagctcctttgggagatcaagcaggcgcgggatgtgagccacgagaatacggtgcgtttcgtgggcgcctgcatcgatctgccgcgacccaccgtgctcatcctcaccgaatattgctcgaggggcagtctgaaggatgtgctggagaacgaggccatcgagttggactggaactttcgcatgtctctcatccacgacattgtcaagggcatgaactatctgcacaatagcgatgtggctgcccatggaaagctgaggtcttgcaattgcctgatagacggacgattcgttctcaagatctccgactttggactgagaacgctgaccacgccctctgattttgtgcgggatcagaactactacctcaccacgcagcgcggcgatgtgtactcctttggcattattctggaggagatcgtcaaccgtggtggaccctaccaggaggcgcgccagcagatggacgttcacacgatcctgcacaaggtgcgccagtgcaatggattccgtccgctcatcagagaacgcgagtgtccacctgatctgctggagctaatggagaagtgctgggcagacaatcaggaggagcggcccactttctccaccatacgcagtaatattcgcaccataatgaaaggcttctgtgagaatctaatggatgatctactgaatcgcatggagcagtatgccaacaatctcgagagtctcgtggaggagaaaacccgccagttgagcctggaaaagcagcgtacggaggagctgctctaccaaatcctgccgcgtcctgtggcccagcaactgatggccggcgatcttgtggagccggaggagttcagcagcgtgaccatatactttagtgacatcgttggcttcaccgaactgtgcgcccgtagcagtcccatggacgtggtcaacttcctgaatgacttgtatagcacatttgaccgaatcattggcttctacgacgtctacaaagtggaaacgattggtgatgcctatctggtggtttctggattgccggagcccaatggtgacaagcatgcccgcgagattgctctaatggccctggacatcctacgagcagtcagctccttcaatctccgccataaaccggaatacaagatacagattcgcattgggatgcattcgggttccgtgtgcgccggagtcgtgggcaagaagatgccgcactactgtttgtttggcgacacggtcaacacggcgtcgagaatggagagcactggccagccgggcaagatacatgtgtcctcggccaccaaggccatcctggacaagttcggcaccttccaaatggagcagcgcggcgatgtcgagctaaagggcaagggcacggtcaccacctactggctgaatagcacctccgagggcgaggcgcgtcctccgactccgcagatcctgaccaccgatgaggtgcccttcccgctgctcttcgccggcatgggaaagtag

SEQ ID NO: 120 - protein, 1076 aa, Drosophila melanogaster
  AAF46649
  GI:7291217
MHLLGISIHFFFLMYVNCFSAHPNPRRNDITWDDLNKDISLDSTTSLAGLNASDAGLEQRMYERSRESKSTQLSRYTEVGEMGSTMRVYNVGVLMASHLDSPFDLERCGPAVDLALDEINKVFLKPHNITLLKKKGSYPSCSGARAPGLAADMYFQDDVIAFIGPACAFALEPVARLAAYWNKPIITGMGDQPPSSEGELTVTSGILGRIHKWKNENTGMFKDKSKYPTLTRMSYCQCRLILVFASVIRQFNWNHVALLVDRSELFSWTVGKNLEYGLRQEGLLSFVKELNGNEEEVYENYLKDASMYARVVILSVRGVLVRKFMLAAHSLGMTNGEWVFLDVEIFQSEYWGDKGWEMKDEHDAKARKAYEALLRVSLLQPTSPKFQDFADNVRENALYDYNYTFGEGEEVNFFIGAFYDGVYLLGMALNETLTEGGDIRDGVNITRRMWNRTFEGITGHVRIDDNGDRDADYSILDLDPINGKFSVVAHYSGVHKQMKLSKELNNMSWRVRPDDVLIEMGGMFGSKGGLQRLDVENISLQQFGIHSGRASIASFTSLPPQVYTTIGQFKGERVAIKKVNVKKVDLTPQLLWEIKQARDVSHENTVRFVGACIDLPRPTVLILTEYCSRGSLKDVLENEAIELDWNFRMSLIHDIVKGMNYLHNSDVAAHGKLRSCNCLIDGRFVLKISDFGLRTLTTPSDFVRDQNYYLTTQRGDVYSFGIILEEIVNRGGPYQEARQQMDVHTILHKVRQCNGFRPLIRERECPPDLLELMEKCWADNQEERPTFSTIRSNIRTIMKGFCENLMDDLLNRMEQYANNLESLVEEKTRQLSLEKQRTEELLYQILPRPVAQQLMAGDLVEPEEFSSVTIYFSDIVGFTELCARSSPMDVVNFLNDLYSTFDRIIGFYDVYKVETIGDAYLVVSGLPEPNGDKHAREIALMALDILRAVSSFNLRHKPEYKIQIRIGMHSGSVCAGVVGKKMPHYCLFGDTVNTASRMESTGQPGKIHVSSATKAILDKFGTFQMEQRGDVELKGKGTVTTYWLNSTSEGEARPPTPQILTTDEVPFPLLFAGMGK

SEQ ID NO: 121 - DNA, 1431 bp, Drosophila melanogaster
  Name: CG5653
  AE003553
  GI: 10728037
  Transcript: CT17866
atggaaaaatgccgtgcctcctctaggataatcataatcggagcaggagtttcgggcatagccgccgccactcgactcctgcaaaacaatttccagaatgttcagatcctggaggcggaggatcgcattggcgggcggatcaacaccgtgtattttggtgacaacgtcatcgatttgggagcccagtggtgtcatggaaagcagcaaaattgtgtatacgacatggtcaaggatatgggtatcctgcacgagacaggcgactattacagtcccataaagagggtgagatccaacaaggaggtggttccacatgagttggcctgcaggattcacgacattgctgtgaagagcatgccgagtggacctcacccggttgtgggatcctttggcacccacctgactcagaccttctggcgcaagatcgagtccgagctaccccaagtgaatagggatgtggctagtgaggccttgaatacatttgcgaagcatgaaagctctattattggtgcggacaatcttttcgaggtctccgttagggaacacatcgagtaccacgaatgtgatggcgacaagctgctccactggggaacgaagggttaccggcgcttcctgcggctgctgatgaaggtcagcgcggatacgccagaagagctgggtctactggaaggacgtattcaacttgatatgaaggtcatcaagattgagttggcgtgcccccgtaaggtaatcctgcgctgccaggatggggattacttcgaggcggaccacgtcatctgcaccgtttccctgggagtcctgcaggagcagcacgagaaactgttcgtcccgccgctgcccgcagccaaggtgaatgccattcgcagcctcaccctgggcactgtgaacaaactgtatttggagtatgagaagcaacctcttcctgacggctgggtgggtttcttctgcttttggctggaagaggatctgatagagctgcgaaagacggaatatttctgggtggagggtataaccggtgtacacatgatcacttgtcagccccgaatgttgatggcctgggtgaatggtccgcatggacgccacatggagaccctgtccgatgagaaagtccttgagggcttgtactggcttttccgaaagttcctcactttcgaaattccgccgccaaagcgtttcgttcgcagctcgtggttttcgaatccgaatttccgtggcagttggagttatcgtggagttatggccgatgaaaggaatacgggcccctgggatctagagtctcctgtgttgggcgaagatggtcatttaggcctcctttttgccggagaagcgtctagcaggaatcacttttccaccgttcacggagctgtggaggcgggctatcgggaggcagaccggctcattgatcattacacctcatgcagtgtcagtgcctga

SEQ ID NO: 122 - protein, 476 aa, Drosophila melanogaster
  AAF50345
  GI:7295017
MEKCRASSRIIIIGAGVSGIAAATRLLQNNFQNVQILEAEDRIGGRINTVYFGDNVIDLGAQWCHGKQQNCVYDMVKDMGILHETGDYYSPIKRVRSNKEVVPHELACRIHDIAVKSMPSGPHPVVGSFGTHLTQTFWRKIESELPQVNRDVASEALNTFAKHESSIIGADNLFEVSVREHIEYHECDGDKLLHWGTKGYRRFLRLLMKVSADTPEELGLLEGRIQLDMKVIKIELACPRKVILRCQDGDYFEADHVICTVSLGVLQEQHEKLFVPPLPAAKVNAIRSLTLGTVNKLYLEYEKQPLPDGWVGFFCFWLEEDLIELRKTEYFWVEGITGVHMITCQPRMLMAWVNGPHGRHMETLSDEKVLEGLYWLFRKFLTFEIPPPKRFVRSSWFSNPNFRGSWSYRGVMADERNTGPWDLESPVLGEDGHLGLLFAGEASSRNHFSTVHGAVEAGYREADRLIDHYTSCSVSA

SEQ ID NO: 123 - DNA, 5049 bp, Drosophila melanogaster
  Name: CG17740
  AE003822
  GI: 10727606
  Transcript: CT39323
atgcttcgccatatcgtgctcctcattctgctgtcttccgaagtcagaggagtctgcaatcggataccccaaggtgccagtggccctcgatcgcctgtggatgataactttaagatccttatcgatggcaatccagagacctatgtgccagaacatcagtacaatgtttcgttatcctgtccaataaacatgaaattcgtgagcttcaccttggtggtcgaggctgaggatccgtcggctgccttcggtggtcaggatatgaccggtcactttgaactgctgggagtcggagacacccgattcagtaccagttgtgagaacatggtggagaacacaaatacgaatgccaagatctatatcgcggtatcctggatagcaccacgtaatccggacagcggttgtgtactgattaaggctggtgtggttcaacatcgtgatgtgtggtttctggacgatggcttcctgaccaagcggatttgtcccgaggaaatcgacgaactgaacagcttaacaccacccttggaaacttgctgtgcctgtgatgaagccaaatatgagattgttctggagcgaaagtgggcaaggaacacccattggaaggactttccctctgaggactggcgcacacgcttgggcgaggtgattggtgcttcacatagccacagctatcgctactgggcctacggaggaagagcgagcaagggcatgaaggagttggccgagcacggagctacacgtacccttgagaatgagatcagggagaatactcagaatggcgaggtgagaactataataaaggctcctggaattccctatcgtccgaaaacatttggcacaaccctggccaatgctcgtctggatccagtacaccatcagatatcgctagcagccaagattgatccttcacccgattggatactgggcgtggctggattggagctttgcttgagcaattgtacgtggctggagcgaaagtcctcagatgagccacaagtgccaccggatgtggtgcgccgtataacatcttcgtatcccagcgaccatcgttcgccattttacgatgacaccggtgccccaatgaaacccttggccacactctacttgacccggaagaaactctacattagggagtgcgaagaggtattagttccccaggaaggaccgctggagtgcgctgtacacccttggaacgagtggaccaactgcagcacgcgatgtggtcagggctactctcatcgtcagcgtagcttcaagaatcccaatctagctgccaactttaactgcgataggcgcttggaggagttccgccaatgccagggaacccaatgtggggcagcggaggaggaactggaaggcgaggagcctggcctgggcatggaaaatcccccaagtagtggctcaatggccgagtgccagctgaccaactggggcgagtggtcaccgtgcacgaagacatgcggcagaggatcttccacacgtacccgggactattacaatccgcaggccaggcagcgctgtttgtccgtgatgcgaataccgctcgaggaaactcgggagtgcattggatcagattgtggtggcaccattccggataatggcgaactcgatggctttccggaaccagatgtgttcggagagacggatcacggcggttacatgggcaaaaccacttcttggaacagtaaacaggagcattccagtctaggttccggcaaccaggcgtggaatagaaagccctacaattcgtggaaagataaatctctttccaaccctagagataacgcacaggagtccccaaacttaccgttcgatcagatagaaaatcctcagagacctgcgtataatccatctgacaatatgggtggttatgacaagggctttcctccgacaaatagctacagcaatgacaagcttgtgggcaatagacccggctacaatgacttcaattcggactataacaacaaggacgcttacaatgattacactacccctagttttacatctcgcactccctttggaagtcggtatcccaatcagcaggagactgtggagggaaataccaacgatatcaatggcaactataatgtggttcaagattattgctttgaaaagccatatgcctcgactcttccctgtttcgccaaaccggtggtggagagcaattactggttctacgatcacgaagatcacgagtgcaagatcttcaccacggacaactgtgatcagaatagaaaccgattccgtaccctgacggcctgcgagggcacctgtctgcagccccaaataaacatggagcgatccgaaaacgatgccatggacttgtacggaaggagatcctatgaccaaaaacaaacgagagatcatataagcaaacaggaggtggatcctatgatcaaccagaagataggtcctatgacttatcgacagcaggaggtagatcctatggagaaaccagtgaagcaggtgatattggagaacccatgtcgcagaccaggagcagatacgacacatccagacgcgaacacgaacatgtggtggtcaagtggtgctcctctcgtggagctacttctgcttgggtccctggtgattggtagagtcagctccctgatatgcacgcgccgtccagcgaacacgggctcgcccaaatctccggtggatgagaactttatgataagcgtgtcgggtaatccggaaacgtacattctcggccaggaatacaacgtctctcttaatgccttcaatggccaccgctacattagctttatcatggcactggaaaacgagaatggtgactttagctacaacgatgacttgggtcgctttgagctgagcgacttgattgagacccggttcagtccgaactgcatcaacatggtggagaacaccaatacgaactccaagacgcacatgcacttgacttgggtggcgcccagtgagccgggcagtggctgcgttctgatccgggccacagttcagcagcatcgcgaggtgtggcacatggatgatggcggtttaacaaaacgcatctgcgaggaggtcaccgatgatgtggaaagtcagccaactgctccggcggcagtggatgtgccctgctgtgcatgcgatgaggcgcgctatgagcttatatttgaaggcgtctggtccaggaacctgcatcccaaggactttcccactcgaggctgggagactcgattctgtgagcttctgggagccgcccacagttcggattatcgtttctgggagtccggagaactggccagcgtggctatgaaggaatatgcggaacattgcagttcgcgtctgctggagcgagagttcagcattaattttcgggatcaaaagatacggacgataatcaaggcacggggcccatcgtatcccaacataagcagcaagacaatggcctcggtgcgagtagatcccattcaccacatggtgtcctttgcctccaagatagaaccctctccggattggattgtgggcgttactggactggaactatgcctgcgcaactgcacatggatggaggaaaaagtgatcaacctatatccgtgggatgtgggcacagattcgggtcccacctatacgtcatccgatcagccccaagttccgccagatgtcattagacgcatgcgttccgactttcccaatgatccgcgctctcctttctacgacatatccggaactcccatgaaacccatggccattctgacggtgaagcgccagcgaatctacgagagaagatgtgcagatgaggactccaacaacgatcccgatgtgccgcgtgaatgtttcacccatccatggtccagttggagcgactgctcttccaaatgcggggttggcatgcagtatagaagacgtgtctataagcaaccggagctcgcaagggtctacaattgcaatgaggcgcagtatgaggagcgcgagtgccagggcgagatgtgtggtcaaaataatctcatgcgggagccggaggaatttgaggacctggagccagatccaaggaggattggttatcaaccgtcacaacaacgccgtgccgaatgcgaactcagttcctggggcagctggagcccatgtagtgtaacctgtggcgatggttacgagatgcgccagaggcagtaccttaatccccaagcagagttcgattgccagggtgtacatcgcatggagctgcaggaaacgcgaaaatgctctggtcgagattgccttggtagcttaccaggatcctacagcaccgacatggatagtccctatggcggggcttctccaggacgaattggaggcaatatgtatggaccgcaacttgaacccgaggcagagaactttggtgactacgatgactcacgaaatggagcagttggtggattcgaagtgggcaatcttaagggcaacattggcaattgggccttgaacaggcaaacaaatttgggaagagatgttccgtcgcttaggcccacaaactacgatagagcccgccagcaagcagaaaaatcagaacgaaccacgtggtctgggcagtcacgtcccgatgatccgcgcttggaggatgtggaacgtgctccttggcatcgtcaaaggccctccaacaaatacggctcaatcgtagaggcgcccgaaatggtttcgccaagggaaccatggcaaagggcaaacaactttggcaatccggacatgtatacacctggaggagatgtggacccctcgctgtcctaccgctgcttccaaatggttcagacggctcagccacgctgccacgatcaaactattacgggtcacttttggttctacaacttctgtgcggatgagtgcatgctgtatgccgcggatcagtgcgatcggaatgtgaacaagttcaggcggtgggaggattgcgagaaatgccggcagccaggaatggctgcactgcagcaggagcacaccaattcgccacagtgcgaggatttccgtgccatttggcaggcggagcagcgggctcgggaggaaaagcggccatcaaaccgcaggcgcaactatggcgattccagatatcggactagaaattag

SEQ ID NO: 124 - protein, 385 aa, Drosophila melanogaster
  AAF58535
  GI:7303479
MWWSSGAPLVELLLLGSLVIGRVSSLICTRRPANTGSPKSPVDENFMISVSGNPETYILGQEYNVSLNAFNGHRYISFIMALENENGDFSYNDDLGRFELSDLIETRFSPNCINMVENTNTNSKTHMHLTWVAPSEPGSGCVLIRATVQQHREVWHMDDGGLTKRICEEVTDDVESQPTAPAAVDVPCCACDEARYELIFEGVWSRNLHPKDFPTRGWETRFCELLGAAHSSDYRFWESGELASVAMKEYAEHCSSRLLEREFSINFRVTPCLKRLVGSTLCYIFPLTGSKDTDDNQGTGPIVSQHKQQDNGLGASRSHSPHGVLCLQDRTLSGLDCGRYWTGTMPAQLHMDGGKSDQPISVGCGHRFGSHLYVIRSAPSSARCH

SEQ ID NO: 125 - DNA, 3612 bp, Drosophila melanogaster
  Name: Tepl
  AE003649
  GI: 7298255
  Transcript: CT40635
atgtcctcgaagtcggttaggtttgacattccgaagctaacagaaggcgattacgagctaaaagttatgggtagcggaggcatcgagttccagaattccaccaagctgagctttgcgcccgacttaaattggttatacattcaatcggacaaggccacctataagcccggcgataagatccaatttagggtactcttcctagacaagaacacccgacctgccgtaatcgataagcccattaaaattgagatccgcgatggagaccagaatttaattaagagctggaaagatatcaagccggcaaagggtgtctattccggagagctccagctgtccgacagacctgtactaggcaactggaccgtaaccgccacggtgcaggacgagggcaaagtgactaatgtgctagtggtggacaagtatgtggttccgaagttcgaggtggtcgtattaaccgctaagaatgtggcggctagtgctgggtatattagggcaacgataaaagccaggtacacattcaagaaacccgtaaagggccacgtcgtcgctacgatcgagggcagctcgaccgagcagagcctgcccattgatggagaggtgaatgtggagtttcccatttcagcgactgccaagagacttttgaaaataacggccattgttaccgaggagctgacggacatcaaacacaatggtactgcctacgtgacagtccaccagcaccgtcataagctggaagatcttttttggccaacgcattataggccaggtgtatcgtctgaatttaagactgtggttagaaacttggacggttctcctgtcatggactcttctaagatggttaacttcaacgtcttgccacaactaaggaagctacttaaaatcaatattatatccgatacctatcttccttactttattctcactgttgtcgcacgcggtaacattgttctcagtctttttcaagagatgaaagaaaaaaaaaagagtcaggaaattgagttcgagccaacctttgcactggtgcctcaagctacgatatttgtccattacattatcgatggagttttgatgtctgacgagaaaactgtcgatatcgagagggactttgagaacacaattgaaatattaacaacaaacgaagcattgccaagggatgaagtgagcctaaaggtgaaaaccaatccccattctttcgtcggactccttggagtggaccagagtgtgctacttttaaggtcaggaaatgacctgaaccgtgatctaatattgaacaatctcgccacgtactccaccgatttggtgatcctaacaaatgcgaatataaatatctacaggagctcgggtggctgttataccaatcctgcaaagaactcaggtcctgttcccattgtcggttcaaccagagcacaagcttcacttccaccagttcgtaagctctttcccgaaacatggctgttttcaaatattactgacgtgggcgccaacggtgaatatatcattaaagaaactgttcccgatacgttgacctcttgggtgatcacaggcttttcccttagccctcaatccggccttgcagtgaccaggaatccgagcagaattcgtgtgttccaaccattctttattaccaccaacttgccgtactctgtaaagcggggtgaagtgattgccattcccgtgatcgtctttaactacttgggaatggatgtgaaggcgaaagtattaatggataactctgacggtcagtacgaatttattgagacaaccaacaaaaatgtgtcccagtatcttaggggagtccgaaggaaaaaaacattatggattcccgcgaatacaggacgtggcatttcattcatgatccgcccaaagaaagtgggcctgactactctgaaaatcaccgccatttcgaaatatgccggtgacagactccatcaaatactgaaagtggaggccgatggcgtccaaaagtacgtcaataaggccgtattaattaacgttcaaaggttgaatcgtcgtagtttggcaccaccggaaaaaacaataatcatagaaaaagccgacaatgttattgaaggttccgagactgtagaattcgaagtgtgcggaactagccaagcgcctcaactggaacaccttgacgatctggttcacttgccctgcggatgtggagagcagaacatgtttaactttgtgcccagtatactggcgttaagctatttaaaagcaaaaaatcggcaggatcaagagatagaaaataaagctaagcgttatgtggaaactggttaccagatagaactcaactacaaacgtaacgacggttcctttagcgcttgggggcaacacgatgctttaggcagcacatggctcactgcatatgtgatacggtcctttcaccaggccgccaaatacatcgacattgacaaaaatgtgttggtagctggacttgatttcctcgtgtcccgacagagtacagatggaaagtttaaagaattgggcatggtaatacacaacagtcatggaagtccattggcacttacatcatttgtcctgctgactttcttcgaaaacgaggaatatatgcctaaatataagcatgtaatcgatagggctgtggaatttgtggttacggaggtgcaccagtcaaatgagccgtatgatctggccattgccgccctggccctgtcattagcaagaaaccgcaatgcctataaagttctggataagttggataaattggccactcggcgaggtgatcacaaatggtggaccggttctgataagtgtaagagcagcgaagtagagaccacctcttatgtcctgctcgcccttctcgagcataatatatcggatgaacccaaaccgattgtcgattggctgattagcaagcgcaacagcaacggaggttttgtctcctcccaggacaccgttgtgggtataatggccttaaccaagtacgaactccaatcacatgcctcgaccgaagctattgacatagagttttggcatttgaacgaagataaaaaacatgtaagggtaactaaagaaaatgaatttaaagtccagactcatcagcttcctgaaaacacaaacgaggtgaagttgttggccaaaggtcaggggcgtgcacaagttcagctgacgtaccgctacaacgtggccaccaaggaggcgagacccagcttcaaattaacgactacggttaagaagtcccataaaggccgactgatccttggcatttgtggcacgtacacccccatcgcagcctccgagaggaataagaccaccaatatggctttgatgcaggtgcagctaccatctggttatgtttgcgatatcgagccctttgccgatatcgaagccatttcagacgtaaagcgtgtggagaccaaaaacgaagacaccgaggttcatatctatttcgaaaagctgtcacctggtgaccgcaagtgcctgaccctagaggccatatacacccatgcggtggccaatctgaaaccttcttgggttcggctctatgattactatgccaccgaacgcagtgctaccgaattctatcacgtggacacttctctgtgtgacatttgccacggcaacgagtgcggaaatatgtgctaa

SEQ ID NO: 126 - protein, 1354 aa, Drosophila melanogaster
  AAF53490
  GI:10728811
MLWLILSSTILHCVLLSNANGLYSVLAPKTLRSNSAYNVVVAIHNTTRTTEVSVSLTGPSLNSRKYVDVQSMSSKSVRFDIPKLTEGDYELKVMGSGGIEFQNSTKLSFAPDLNWLYIQSDKATYKPGDKIQFRVLFLDKNTRPAVIDKPIKIEIRDGDQNLIKSWKDIKPAKGVYSGELQLSDRPVLGNWTVTATVQDEGKVTNVLVVDKYVVPKFEVVVLTAKNVAASAGYIRATIKARYTFKKPVKGHVVATIEGSSTEQSLPIDGEVNVEFPISATAKRLLKITAIVTEELTDIKHNGTAYVTVHQHRHKLEDLFWPTHYRPGVSSEFKTVVRNLDGSPVMDSSKMVNFNVLCCQVSKNFSASLQNSIATEHIMLPETCQSCLVTSTFDTAENIERYIYKLNKPLMIAINTKKPQLRKLLKINIISDTYLPYFILTVVARGNIVLSLFQEMKEKKKSQEIEFEPTFALVPQATIFVHYIIDGVLMSDEKTVDIERDFENTIEILTTNEALPRDEVSLKVKTNPHSFVGLLGVDQSVLLLRSGNDLNRDLILNNLATYSTDLVILTNANINIYRSSGGCYTNPGYTNCTGSLIGRTMFKNEPTKNSGPVPIVGSTRAQASLPPVRKLFPETWLFSNITDVGANGEYIIKETVPDTLTSWVITGFSLSPQSGLAVTRNPSRIRVFQPFFITTNLPYSVKRGEVIAIPVIVFNYLGMDVKAKVLMDNSDGQYEFIETTNKNVSQYLRGVRRKKTLWIPANTGRGISFMIRPKKVGLTTLKITAISKYAGDRLHQILKVEADGVQKYVNKAVLINVQRLNRRSLAPPEKTIIIEKADNVIEGSETVEFEVCGTSQAPQLEHLDDLVHLPCGCGEQNMFNFVPSILALSYLKAKNRQDQEIENKAKRYVETGYQIELNYKRNDGSFSAWGQHDALGSTWLTAYVIRSFHQAAKYIDIDKNVLVAGLDFLVSRQSTDGKFKELGMVIHNSHGSPLALTSFVLLTFFENEEYMPKYKHVIDRAVEFVVTEVHQSNEPYDLAIAALALSLARNRNAYKVLDKLDKLATRRGDHKWWTGSDKCKSSEVETTSYVLLALLEHNISDEPKPIVDWLISKRNSNGGFVSSQDTVVGIMALTKYELQSHASTEAIDIEFWHLNEDKKHVRVTKENEFKVQTHQLPENTNEVKLLAKGQGRAQVQLTYRYNVATKEARPSFKLTTTVKKSHKGRLILGICGTYTPIAASERNKTTNMALMQVQLPSGYVCDIEPFADIEAISDVKRVETKNEDTEVHIYFEKLSPGDRKCLTLEAIYTHAVANLKPSWVRLYDYYATERSATEFYHVDTSLCDICHGNECGNMC

SEQ ID NO: 127 - DNA, 4184 bp, Drosophila melanogaster
  Name: for
  AE003579
  GI: 10727349
  Transcript: CT43154
attcgtccggcaggcggcgtagcgagaaaacgtgtgtggcgcatgcgcatgcgctcggttgcgaaaagtgcacctggatttgaaattaagccacaagaataacagaaatcaaaactcccccacttcgtgtttggccatttcttcggctgtcgtatcgtgattttcaattcgccctcgtgtgtgcttaacggtattatagagcattttgcatatggcaaccgctgccagtgaattaataataaaagccacaaaccagacaattaccatgccttgcgcatatgcctttgagctatttccaacaataatgcttacataaatagcagctctggttgatgttctaaatagcaagtaaacaaaaccgcacaattttcccatgctcggtttttccgctcggctgtaattatgttgaaagagatcgggaaacgcttcgtgttaatttctttgaactgctcgcaaattcttggaataaagtgaattaaaagtgaaagtgaattctttaagcactcgcattaagtgagggaaataagcttaaaaacacccacggacttaaagagaatgagacgcagaaacggagacttggattttgctctttttctcgaattgaacgcaaagatcacttgaagaattccggcctgaaaaccgtaggcatcgccattcccagtgactcttcaaatattccgtgcgcgaaactgcagagctctttggttatgcaaaagacctccgaaaataacaaacaacaggcacaaaaacataaactaaacgctggtggagccaaagacaaacgaatcacgtcgctgcagctggtcaagtgaaatttttctttcgtaatgaaaatcaaacattatccgggcaaagccgtcgatgcgagtctctcgctggagggcagcagtgccatgggtgccctgtacgaggccaattggctgagggctgcgaatcagcccgccgctccagccacaacgggcaccaaattgagcaggcagagcagctccgccggcagcagtttcctcatcgagggcatctccgccctgagcaagtaccaaatgaccctggagaatatccggcagctggagctgcagtcgcgtgacaaacgcatagcgagcacgattaaggaactcagcggctataggccatcggcactgcagcatcatcagcagcagcagatgcataacgtttgggtggccgaggatcaggatcaggaacacgaagaactggaagatgcttcggagggaaaggagaagttggctagtatccaggaaccccctgcagttaaccactatgtcctggacccgacggagagaccaagggttcccagaccccggcaacagttctccgtgaaaccgccttccttgcgtcgctcccaaaccatgtcgcaaccgcccagttatgccaccttgagatcgcccccgaaaatcaaggaaaatcttagcaaaagttcctccgcctactccacattctcctcggctgcagaggattcccaggatcaagtagtgatctgccaacagccacagagactgatggctccgccacccagagaaccgcctccggagccacccaaaagggtatcgaaacccctgagcagatcgcaaacttcggttcagcggtacgccacggttaggatgcccaaccagaccacttcgttcagcagaagtgtggtcaggtctagggattccaccgcctcccagagacgtctcagtttggagcaggccatcgagggactcaaactggagggggagaaggctgttcgtcagaagagtccacaaatctcaccagctgccagcagtaatggcagctccaaggatctcaacggggagggtttctgtatcccacgaccgcgcctcatcgttccagtgcacacatatgcccgtcgacgcaggacgggaaatctcaaggagcaatccagcggtgggcaggaggaggaagcagagaaggatggacgcgtggaggtttcccgcgagggcaagtacctctccacattgtcgggagcgaaggtccttggcgaattggcgatcctgtacaactgccagcggacggcgaccatcaccgcgatcaccgagtgcaacctgtgggccatcgagcgccagtgctttcagaccatcatgatgcgaacgggcctgatccggcaggcggagtacagcgatttcctcaagagtgtgcccatcttcaaagacctggcggaagacacgctcatcaaaatctccgatgttttggaggagacgcactaccagcgtggcgactacatagtgcgccaaggcgcccgaggcgataccttcttcatcatatccaagggaaaagtgcgagtgacgatcaagcagcaggacacgcaggaggagaagttcattcgcatgctgggcaaaggggatttctttggagagaaggctctccagggcgatgatctgcgcacggcgaatattatttgcgagtccgccgatggcgtcagttgtctggtcatcgatcgcgagaccttcaatcagctaatttccaatctagacgagatcaagcatcgctacgacgacgagggcgccatggaacgcagaaagatcaacgaggaattccgggacattaacctcacagatctgcgcgtcatcgcaacccttggagttggaggcttcggtcgcgtagagctggtccaaactaatggagatagctccaggtccttcgcgctcaagcagatgaaaaagtcacagattgtggagacgcgtcagcagcaacacatcatgtccgagaaggagatcatgggcgaggccaattgccagttcatcgtgaagctgttcaagaccttcaaggacaagaagtacctgtacatgctgatggagagttgcctgggcggagagctctggacgattctacgggacaagggcaacttcgacgacagcaccacccgcttctacacggcatgtgtggtggaggcctttgattacttgcactcgcgtaacatcatctaccgcgatcttaagccggagaacctgctgctcaatgaacgaggatatgtgaagctggtggactttggctttgccaagaagctgcagacgggcaggaagacctggactttctgcggcactccagagtacgtggctcccgaggtgattctcaaccggggccacgacatcagtgcggattactggtcgctgggagtgctcatgttcgagttacttactggtacccctccattcacgggctcggatcccatgcgcacctacaacattatacttaagggcatcgacgccatcgaattcccaaggaatatcacccgcaatgccagcaacctgatcaagaagctctgtcgcgacaatccagccgagcgtttgggctaccagcgtgggggaatcagcgagatccaaaagcacaaatggttcgatggcttctattggtggggcctgcagaactgcacactggaaccgcccattaagcccgccgtgaaaagcgttgtggatacaacaaactttgatgactatcctcccgatcctgagggtccgccgccagatgatgtcactggatgggacaaggacttctgaggagaatcagaacccgtttcctagacgatgctctctaaacgcttctgctgcagaaaaccaggaggatatgaaagccagggaagaaaaattgatcttaagtgcgccatatgtacgccaaagccaacagcaacagtcagcagctcgcatcgaaaagctgccacaaaaaaaaacaaagaaacgtagcagtcgcaaggtcaagggccgacacaaaagcacaatcatccatcgtcgtagctccatttgagatttatagatacgtctccgtgatgttataaccatgatgtgcaacgcaatgaatttattaacgagtttataactattattttataatgaggatatatgtgtctagttcgcttggaattgatgtaaattgtaagtaggtctgtgactctgtttcagagctctgttagccatgtgcattgtataaattcagctatttgtatctattaaatatttttaacataattattacacatcattgttaaagcatacaaatcgggttgccttatagtctgtaagagaacatttgaaagcaacatttgaccaagatcttccgtcacacatttcttaaaattctatgtggcctctctactgtctttcattagtcttagcgatcatgtctattatatttacgaataacatgcccttttaattgtcttttttaagtaaatc

SEQ ID NO: 128 - protein, 1088 aa, Drosophila melanogaster
  AAF51082
  GI:1072350
MRFCFDRLCFATKRPAQNSNSNAPHSSTTVDAPPRPADVDVATVPVATPAPPPQQPVSNLFYADYQKLQPAIIDRDWERDRDTDTDTRSEAKPPDIVEHIEPVEEQRQIHTQIQSPAEIQIQIPPTPPAPSIQIQIQQRYRRHSSAEDRNLNTRRNDSNITEALRKAASMQQEPNANYQFPTDLGLVSIVNNNNNTNTHPSGSNSGSNNNSNINNNLVGGIVTLPAAGGLIGLEHTASGLRLIPAPPTHSDVLTHTLIYGTPPSGAQQLNQDPRSLLHQQELQLQQRYQQLQQLQAQTQGLYTSQGSPVLYHQPSPGSSQPVAIPGATCHSPTQLQPPNTLNLQQQMQSLRISGCTPSGTGGSATPSPVGLVDPNFIVSNYVAASPQEERFIQIIQAKELKIQEMQRALQFKDNEIAELKSHLDKFQSVFPFSRGSAAGCAGTGGASGSGAGGSGGSGPGTATGATRKSGQNFQRQRALGISAEPQSESSLLLEHVSFPKYDKDERSRELIKAAILDNDFMKNLDLTQIREIVDCMYPVKYPAKNLIIKEGDVGSIVYVMEDGRVEVSREGKYLSTLSGAKVLGELAILYNCQRTATITAITECNLWAIERQCFQTIMMRTGLIRQAEYSDFLKSVPIFKDLAEDTLIKISDVLEETHYQRGDYIVRQGARGDTFFIISKGKVRVTIKQQDTQEEKFIRMLGKGDFFGEKALQGDDLRTANIICESADGVSCLVIDRETFNQLISNLDEIKHRYDDEGAMERRKINEEFRDINLTDLRVIATLGVGGFGRVELVQTNGDSSRSFALKQMKKSQIVETRQQQHIMSEKEIMGEANCQFIVKLFKTFKDKKYLYMLMESCLGGELWTILRDKGNFDDSTTRFYTACVVEAFDYLHSRNIIYRDLKPENLLLNERGYVKLVDFGFAKKLQTGRKTWTFCGTPEYVAPEVILNRGHDISADYWSLGVLMFELLTGTPPFTGSDPMRTYNIILKGIDAIEFPRNITRNASNLIKKLCRDNPAERLGYQRGGISEIQKHKWFDGFYWWGLQNCTLEPPIKPAVKSVVDTTNFDDYPPDPEGPPPDDVTGWDKDF

SEQ ID NO: 129 - DNA, 3799 bp, Drosophila melanogaster
  Name: for
  AE003579
  GI: 10727349
  Transcript: CT42452
gcgcatgcgcatgcgctcggttgcgaaaagtgcacctggatttgaaattaagccacaagaataacagaaatcaaaactcccccacttcgtgtttggccatttcttcggctgtcgtatcgtgattttcaattcgccctcgtgtgtgcttaacggcctgaaaaccgtaggcatcgccattcccagtgactcttcaaatattccgtgcgcgaaactgcagagctctttggttatgcaaaagacctccgaaaataacaaacaacaggcacaaaaacataaactaaacgctggtggagccaaagacaaacgaatcacgtcgctgcagctggtcaagtgaaatttttctttcgtaatgaaaatcaaacattatccgggcaaagccgtcgatgcgagtctctcgctggagggcagcagtgccatgggtgccctgtacgaggccaattggctgagggctgcgaatcagcccgccgctccagccacaacgggcaccaaattgagcaggcagagcagctccgccggcagcagtttcctcatcgagggcatctccgccctgagcaagtaccaaatgaccctggagaatatccggcagctggagctgcagtcgcgtgacaaacgcatagcgagcacgattaaggaactcagcggctataggccatcggcactgcagcatcatcagcagcagcagatgcataacgtttgggtggccgaggatcaggatcaggaacacgaagaactggaagatgcttcggagggaaaggagaagttggctagtatccaggaaccccctgcagttaaccactatgtcctggacccgacggagagaccaagggttcccagaccccggcaacagttctccgtgaaaccgccttccttgcgtcgctcccaaaccatgtcgcaaccgcccagttatgccaccttgagatcgcccccgaaaatcaaggaaaatcttagcaaaagttcctccgcctactccacattctcctcggctgcagaggattcccaggatcaagtagtgatctgccaacagccacagagactgatggctccgccacccagagaaccgcctccggagccacccaaaagggtatcgaaacccctgagcagatcgcaaacttcggttcagcggtacgccacggttaggatgcccaaccagaccacttcgttcagcagaagtgtggtcaggtctagggattccaccgcctcccagagacgtctcagtttggagcaggccatcgagggactcaaactggagggggagaaggctgttcgtcagaagagtccacaaatctcaccagctgccagcagtaatggcagctccaaggatctcaacggggagggtttctgtatcccacgaccgcgcctcatcgttccagtgcacacatatgcccgtcgacgcaggacgggaaatctcaaggagcaatccagcggtgggcaggaggaggaagcagagaagggtaaggggtggaaggatttctatgttttaagtcaggataggcatagtagcttttatatcaataggataggacagaattatgattatgattacccaattaattttaatatattttctccagatggacgcgtggaggtttcccgcgagggcaagtacctctccacattgtcgggagcgaaggtccttggcgaattggcgatcctgtacaactgccagcggacggcgaccatcaccgcgatcaccgagtgcaacctgtgggccatcgagcgccagtgctttcagaccatcatgatgcgaacgggcctgatccggcaggcggagtacagcgatttcctcaagagtgtgcccatcttcaaagacctggcggaagacacgctcatcaaaatctccgatgttttggaggagacgcactaccagcgtggcgactacatagtgcgccaaggcgcccgaggcgataccttcttcatcatatccaagggaaaagtgcgagtgacgatcaagcagcaggacacgcaggaggagaagttcattcgcatgctgggcaaaggggatttctttggagagaaggctctccagggcgatgatctgcgcacggcgaatattatttgcgagtccgccgatggcgtcagttgtctggtcatcgatcgcgagaccttcaatcagctaatttccaatctagacgagatcaagcatcgctacgacgacgagggcgccatggaacgcagaaagatcaacgaggaattccgggacattaacctcacagatctgcgcgtcatcgcaacccttggagttggaggcttcggtcgcgtagagctggtccaaactaatggagatagctccaggtccttcgcgctcaagcagatgaaaaagtcacagattgtggagacgcgtcagcagcaacacatcatgtccgagaaggagatcatgggcgaggccaattgccagttcatcgtgaagctgttcaagaccttcaaggacaagaagtacctgtacatgctgatggagagttgcctgggcggagagctctggacgattctacgggacaagggcaacttcgacgacagcaccacccgcttctacacggcatgtgtggtggaggcctttgattacttgcactcgcgtaacatcatctaccgcgatcttaagccggagaacctgctgctcaatgaacgaggatatgtgaagctggtggactttggctttgccaagaagctgcagacgggcaggaagacctggactttctgcggcactccagagtacgtggctcccgaggtgattctcaaccggggccacgacatcagtgcggattactggtcgctgggagtgctcatgttcgagttacttactggtacccctccattcacgggctcggatcccatgcgcacctacaacattatacttaagggcatcgacgccatcgaattcccaaggaatatcacccgcaatgccagcaacctgatcaagaagctctgtcgcgacaatccagccgagcgtttgggctaccagcgtgggggaatcagcgagatccaaaagcacaaatggttcgatggcttctattggtggggcctgcagaactgcacactggaaccgcccattaagcccgccgtgaaaagcgttgtggatacaacaaactttgatgactatcctcccgatcctgagggtccgccgccagatgatgtcactggatgggacaaggacttctgaggagaatcagaacccgtttcctagacgatgctctctaaacgcttctgctgcagaaaaccaggaggatatgaaagccagggaagaaaaattgatcttaagtgcgccatatgtacgccaaagccaacagcaacagtcagcagctcgcatcgaaaagctgccacaaaaaaaaacaaagaaacgtagcagtcgcaaggtcaagggccgacacaaaagcacaatcatccatcgtcgtagctccatttgagatttatagatacgtctccgtgatgttataaccatgatgtgcaacgcaatgaatttattaacgagtttataactattattttataatgaggatatatgtgtctagttcgcttggaattgatgtaaattgtaagtaggtctgtgactctgtttcagagctctgttagccatgtgcattgtataaattcagctatttgtatctattaaatatttttaacataattattacacatcattgttaaagcatacaaatcgggttgccttatagtctgtaagagaacatttgaaagcaacatttgaccaagatcttccgtcacacatttcttaaaattctatgtggcctctctactgtctttcattagtcttagcgatcatgtctattatatttacgaataacatgcc

SEQ ID NO: 130 - protein, 742 aa, Drosophila melanogaster
  AAG22251
  GI:1072351
MQSLRISGCTPSGTGGSATPSPVGLVDPNFIVSNYVAASPQEERFIQIIQAKELKIQEMQRALQFKDNEIAELKSHLDKFQSVFPFSRGSAAGCAGTGGASGSGAGGSGGSGPGTATGATRKSGQNFQRQRALGISAEPQSESSLLLEHVSFPKYDKDERSRELIKAAILDNDFMKNLDLTQIREIVDCMYPVKYPAKNLIIKEGDVGSIVYVMEDGRVEVSREGKYLSTLSGAKVLGELAILYNCQRTATITAITECNLWAIERQCFQTIMMRTGLIRQAEYSDFLKSVPIFKDLAEDTLIKISDVLEETHYQRGDYIVRQGARGDTFFIISKGKVRVTIKQQDTQEEKFIRMLGKGDFFGEKALQGDDLRTANIICESADGVSCLVIDRETFNQLISNLDEIKHRYDDEGAMERRKINEEFRDINLTDLRVIATLGVGGFGRVELVQTNGDSSRSFALKQMKKSQIVETRQQQHIMSEKEIMGEANCQFIVKLFKTFKDKKYLYMLMESCLGGELWTILRDKGNFDDSTTRFYTACVVEAFDYLHSRNIIYRDLKPENLLLNERGYVKLVDFGFAKKLQTGRKTWTFCGTPEYVAPEVILNRGHDISADYWSLGVLMFELLTGTPPFTGSDPMRTYNIILKGIDAIEFPRNITRNASNLIKKLCRDNPAERLGYQRGGISEIQKHKWFDGFYWWGLQNCTLEPPIKPAVKSVVDTTNFDDYPPDPEGPPPDDVTGWDKDF

SEQ ID NO: 131 - DNA, 3327 bp, Drosophila melanogaster
  Name: for
  AE003579
  GI: 10727349
  Transcript: CT43152
acaaacacccatccgagtggatccaatagcggcagcaacaacaacagcaatatcaacaataatctggtgggtggcattgtgaccttgccggcggctggtggtctcataggtctggagcatacggcgtcgggtctgcgactgataccagcaccgcctacccactcggatgtgctgacccacacgctgatctatggcacaccgccctcgggcgcccagcaattgaaccaggatccccgaagccttctgcaccaacaggagctgcagctacagcagcgctatcagcaattgcagcagcttcaggcgcagacgcagggcctgtacaccagccaaggaagtccggtgctgtatcaccaacccagtccgggatcgagtcaaccggtggccatacccggagccacttgccattcgcccacgcaactgcagccgcccaacacgctgaacctgcagcagcagatgcagagtctgcggatctcgggatgcacgcccagcggtacgggtggctcggccacgccctcgccggtgggcctggtggatccgaatttcatagtcagcaactatgtggccgcctcgccgcaggaggagcgcttcattcagatcattcaggccaaggagctcaagatacaggaaatgcaaagggccctccagttcaaggacaacgaaatagccgagctaaagtcgcacttggacaaattccagagtgtctttcccttcagccgtggcagtgcggccggttgtgcgggcacgggcggagcgtcgggatctggagctggcggaagtggtggcagtggtcccggcaccgccacaggtgccacacgcaagtcgggtcagaatttccagaggcagagggcattgggtatctccgccgagccacagagcgagtcctcgctgctcctcgagcacgtcagctttcccaaatacgacaaggatgagcgctcccgtgaacttatcaaggctgccatattggataatgatttcatgaagaatctggatctgacgcagatccgcgagatcgttgactgcatgtatccggttaagtatccagccaagaatctgatcatcaaggagggagatgtcggaagcatcgtttatgtcatggaagatggacgcgtggaggtttcccgcgagggcaagtacctctccacattgtcgggagcgaaggtccttggcgaattggcgatcctgtacaactgccagcggacggcgaccatcaccgcgatcaccgagtgcaacctgtgggccatcgagcgccagtgctttcagaccatcatgatgcgaacgggcctgatccggcaggcggagtacagcgatttcctcaagagtgtgcccatcttcaaagacctggcggaagacacgctcatcaaaatctccgatgttttggaggagacgcactaccagcgtggcgactacatagtgcgccaaggcgcccgaggcgataccttcttcatcatatccaagggaaaagtgcgagtgacgatcaagcagcaggacacgcaggaggagaagttcattcgcatgctgggcaaaggggatttctttggagagaaggctctccagggcgatgatctgcgcacggcgaatattatttgcgagtccgccgatggcgtcagttgtctggtcatcgatcgcgagaccttcaatcagctaatttccaatctagacgagatcaagcatcgctacgacgacgagggcgccatggaacgcagaaagatcaacgaggaattccgggacattaacctcacagatctgcgcgtcatcgcaacccttggagttggaggcttcggtcgcgtagagctggtccaaactaatggagatagctccaggtccttcgcgctcaagcagatgaaaaagtcacagattgtggagacgcgtcagcagcaacacatcatgtccgagaaggagatcatgggcgaggccaattgccagttcatcgtgaagctgttcaagaccttcaaggacaagaagtacctgtacatgctgatggagagttgcctgggcggagagctctggacgattctacgggacaagggcaacttcgacgacagcaccacccgcttctacacggcatgtgtggtggaggcctttgattacttgcactcgcgtaacatcatctaccgcgatcttaagccggagaacctgctgctcaatgaacgaggatatgtgaagctggtggactttggctttgccaagaagctgcagacgggcaggaagacctggactttctgcggcactccagagtacgtggctcccgaggtgattctcaaccggggccacgacatcagtgcggattactggtcgctgggagtgctcatgttcgagttacttactggtacccctccattcacgggctcggatcccatgcgcacctacaacattatacttaagggcatcgacgccatcgaattcccaaggaatatcacccgcaatgccagcaacctgatcaagaagctctgtcgcgacaatccagccgagcgtttgggctaccagcgtgggggaatcagcgagatccaaaagcacaaatggttcgatggcttctattggtggggcctgcagaactgcacactggaaccgcccattaagcccgccgtgaaaagcgttgtggatacaacaaactttgatgactatcctcccgatcctgagggtccgccgccagatgatgtcactggatgggacaaggacttctgaggagaatcagaacccgtttcctagacgatgctctctaaacgcttctgctgcagaaaaccaggaggatatgaaagccagggaagaaaaattgatcttaagtgcgccatatgtacgccaaagccaacagcaacagtcagcagctcgcatcgaaaagctgccacaaaaaaaaacaaagaaacgtagcagtcgcaaggtcaagggccgacacaaaagcacaatcatccatcgtcgtagctccatttgagatttatagatacgtctccgtgatgttataaccatgatgtgcaacgcaatgaatttattaacgagtttataactattattttataatgaggatatatgtgtctagttcgcttggaattgatgtaaattgtaagtaggtctgtgactctgtttcagagctctgttagccatgtgcattgtataaattcagctatttgtatctattaaatatttttaacataattattacacatcattgttaaagcatacaaatcgggttgccttatagtctgtaagagaacatttgaaagcaacatttgaccaagatcttccgtcacacatttcttaaaattctatgtggcctctctactgtctttcattagtcttagcgatcatgtctattatatttacgaataacatgcc

SEQ ID NO: 132 - protein, 894 aa, Drosophila melanogaster
  AAG22252
  GI:10727352
MKIKHYPGKAVDASLSLEGSSAMGALYEANWLRAANQPAAPATTGTKLSRQSSSAGSSFLIEGISALSKYQMTLENIRQLELQSRDKRIASTIKELSGYRPSALQHHQQQQMHNVWVAEDQDQEHEELEDASEGKEKLASIQEPPAVNHYVLDPTERPRVPRPRQQFSVKPPSLRRSQTMSQPPSYATLRSPPKIKENLSKSSSAYSTFSSAAEDSQDQVVICQQPQRLMAPPPREPPPEPPKRVSKPLSRSQTSVQRYATVRMPNQTTSFSRSVVRSRDSTASQRRLSLEQAIEGLKLEGEKAVRQKSPQISPAASSNGSSKDLNGEGFCIPRPRLIVPVHTYARRRRTGNLKEQSSGGQEEEAEKDGRVEVSREGKYLSTLSGAKVLGELAILYNCQRTATITAITECNLWAIERQCFQTIMMRTGLIRQAEYSDFLKSVPIFKDLAEDTLIKISDVLEETHYQRGDYIVRQGARGDTFFIISKGKVRVTIKQQDTQEEKFIRMLGKGDFFGEKALQGDDLRTANIICESADGVSCLVIDRETFNQLISNLDEIKHRYDDEGAMERRKINEEFRDINLTDLRVIATLGVGGFGRVELVQTNGDSSRSFALKQMKKSQIVETRQQQHIMSEKEIMGEANCQFIVKLFKTFKDKKYLYMLMESCLGGELWTILRDKGNFDDSTTRFYTACVVEAFDYLHSRNIIYRDLKPENLLLNERGYVKLVDFGFAKKLQTGRKTWTFCGTPEYVAPEVILNRGHDISADYWSLGVLMFELLTGTPPFTGSDPMRTYNIILKGIDAIEFPRNITRNASNLIKKLCRDNPAERLGYQRGGISEIQKHKWFDGFYWWGLQNCTLEPPIKPAVKSVVDTTNFDDYPPDPEGPPPDDVTGWDKDF

SEQ ID NO: 133 - DNA, 4308 bp, Drosophila melanogaster
  Name: for
  AE003579
  GI: 10727349
  Transcript: CT43158
tgtgtgcgtgccacttagaaacgcaacgcaagtggaaagactcgagaaaacaaaagtgcaggccgtctaaattgatggcgaagtttcgtgtgccgcctgcatttcatttataaatatattttcggccttaattctgtgcttcctgtgaattaacgaggaaactgaagagtgcgcgagcgagacagccgatcacaaatcaacaagtggaaacgaagaaactttcttcgcaaaagccggctgatcgcaacaacaagaagaaaagagagcgattctctgcgactggaaccataacatttacatcgaccctggaatttcttcacttttcgtccaacatggctcccaacgcctggctgattgagttttccgtggcggctgttgatcaggaaagccgcctggatgcgtttctgctttgatcggctgtgcttcgcaaccaagcggccagcccaaaactccaacagcaatgcaccacacagcagcaccacagtagatgcaccaccacgtccagcggatgtagatgtagccactgtaccagtagcaacaccagcaccaccaccacaacagccagttagtaatctgttctatgccgactaccagaagctgcagccggcgataatcgatcgggactgggagcgggacagagatacagatacagataccaggagcgaggccaagccaccggacattgtggagcacatagaacccgtagaggagcagagacagatacacacacagatacagtcgccggcagagatacagatacagatacccccgacgccccctgccccatcgatacagatacagatacagcagcgctatcgccggcacagcagtgccgaagatcgcaatctgaacacgaggcgaaacgattcgaatattacggaggcgttacgaaaagcagccagtatgcagcaggagccgaacgccaactatcagttcccaaccgacttgggtctggtgagcatcgtcaacaataataataacacaaacacccatccgagtggatccaatagcggcagcaacaacaacagcaatatcaacaataatctggtgggtggcattgtgaccttgccggcggctggtggtctcataggtctggagcatacggcgtcgggtctgcgactgataccagcaccgcctacccactcggatgtgctgacccacacgctgatctatggcacaccgccctcgggcgcccagcaattgaaccaggatccccgaagccttctgcaccaacaggagctgcagctacagcagcgctatcagcaattgcagcagcttcaggcgcagacgcagggcctgtacaccagccaaggaagtccggtgctgtatcaccaacccagtccgggatcgagtcaaccggtggccatacccggagccacttgccattcgcccacgcaactgcagccgcccaacacgctgaacctgcagcagcagatgcagagtctgcggatctcgggatgcacgcccagcggtacgggtggctcggccacgccctcgccggtgggcctggtggatccgaatttcatagtcagcaactatgtggccgcctcgccgcaggaggagcgcttcattcagatcattcaggccaaggagctcaagatacaggaaatgcaaagggccctccagttcaaggacaacgaaatagccgagctaaagtcgcacttggacaaattccagagtgtctttcccttcagccgtggcagtgcggccggttgtgcgggcacgggcggagcgtcgggatctggagctggcggaagtggtggcagtggtcccggcaccgccacaggtgccacacgcaagtcgggtcagaatttccagaggcagagggcattgggtatctccgccgagccacagagcgagtcctcgctgctcctcgagcacgtcagctttcccaaatacgacaaggatgagcgctcccgtgaacttatcaaggctgccatattggataatgatttcatgaagaatctggatctgacgcagatccgcgagatcgttgactgcatgtatccggttaagtatccagccaagaatctgatcatcaaggagggagatgtcggaagcatcgtttatgtcatggaagatggacgcgtggaggtttcccgcgagggcaagtacctctccacattgtcgggagcgaaggtccttggcgaattggcgatcctgtacaactgccagcggacggcgaccatcaccgcgatcaccgagtgcaacctgtgggccatcgagcgccagtgctttcagaccatcatgatgcgaacgggcctgatccggcaggcggagtacagcgatttcctcaagagtgtgcccatcttcaaagacctggcggaagacacgctcatcaaaatctccgatgttttggaggagacgcactaccagcgtggcgactacatagtgcgccaaggcgcccgaggcgataccttcttcatcatatccaagggaaaagtgcgagtgacgatcaagcagcaggacacgcaggaggagaagttcattcgcatgctgggcaaaggggatttctttggagagaaggctctccagggcgatgatctgcgcacggcgaatattatttgcgagtccgccgatggcgtcagttgtctggtcatcgatcgcgagaccttcaatcagctaatttccaatctagacgagatcaagcatcgctacgacgacgagggcgccatggaacgcagaaagatcaacgaggaattccgggacattaacctcacagatctgcgcgtcatcgcaacccttggagttggaggcttcggtcgcgtagagctggtccaaactaatggagatagctccaggtccttcgcgctcaagcagatgaaaaagtcacagattgtggagacgcgtcagcagcaacacatcatgtccgagaaggagatcatgggcgaggccaattgccagttcatcgtgaagctgttcaagaccttcaaggacaagaagtacctgtacatgctgatggagagttgcctgggcggagagctctggacgattctacgggacaagggcaacttcgacgacagcaccacccgcttctacacggcatgtgtggtggaggcctttgattacttgcactcgcgtaacatcatctaccgcgatcttaagccggagaacctgctgctcaatgaacgaggatatgtgaagctggtggactttggctttgccaagaagctgcagacgggcaggaagacctggactttctgcggcactccagagtacgtggctcccgaggtgattctcaaccggggccacgacatcagtgcggattactggtcgctgggagtgctcatgttcgagttacttactggtacccctccattcacgggctcggatcccatgcgcacctacaacattatacttaagggcatcgacgccatcgaattcccaaggaatatcacccgcaatgccagcaacctgatcaagaagctctgtcgcgacaatccagccgagcgtttgggctaccagcgtgggggaatcagcgagatccaaaagcacaaatggttcgatggcttctattggtggggcctgcagaactgcacactggaaccgcccattaagcccgccgtgaaaagcgttgtggatacaacaaactttgatgactatcctcccgatcctgagggtccgccgccagatgatgtcactggatgggacaaggacttctgaggagaatcagaacccgtttcctagacgatgctctctaaacgcttctgctgcagaaaaccaggaggatatgaaagccagggaagaaaaattgatcttaagtgcgccatatgtacgccaaagccaacagcaacagtcagcagctcgcatcgaaaagctgccacaaaaaaaaacaaagaaacgtagcagtcgcaaggtcaagggccgacacaaaagcacaatcatccatcgtcgtagctccatttgagatttatagatacgtctccgtgatgttataaccatgatgtgcaacgcaatgaatttattaacgagtttataactattattttataatgaggatatatgtgtctagttcgcttggaattgatgtaaattgtaagtaggtctgtgactctgtttcagagctctgttagccatgtgcattgtataaattcagctatttgtatctattaaatatttttaacataattattacacatcattgttaaagcatacaaatcgggttgccttatagtctgtaagagaacatttgaaagcaacatttgaccaagatcttccgtcacacatttcttaaaattctatgtggcctctctactgtctttcattagtcttagcgatcatgtctattatatttacgaataacatgcc

SEQ ID NO: 134 - protein, 894 aa, Drosophila melanogaster; identical to SEQ ID NO: 132
  AAG22253
  GI:10727353

SEQ ID NO: 135 - DNA, 4277 bp, Drosophila melanogaster
  Name: for
  AE003579
  GI: 10727349
  Transcript: CT43160
attcgtccggcaggcggcgtagcgagaaaacgtgtgtggcgcatgcgcatgcgctcggttgcgaaaagtgcacctggatttgaaattaagccacaagaataacagaaatcaaaactcccccacttcgtgtttggccatttcttcggctgtcgtatcgtgattttcaattcgccctcgtgtgtgcttaacggtattatagagcattttgcatatggcaaccgctgccagtgaattaataataaaagccacaaaccagacaattaccatgccttgcgcatatgcctttgagctatttccaacaataatgcttacataaatagcagctctggttgatgttctaaatagcaagtaaacaaaaccgcacaattttcccatgctcggtttttccgctcggctgtaattatgttgaaagagatcgggaaacgcttcgtgttaatttctttgaactgctcgcaaattcttggaataaagtgaattaaaagtgaaagtgaattctttaagcactcgcattaagtgagggaaataagcttaaaaacacccacggacttaaagagaatgagacgcagaaacggagacttggattttgctctttttctcgaattgaacgcaaagatcacttgaagaattccggcctgaaaaccgtaggcatcgccattcccagtgactcttcaaatattccgtgcgcgaaactgcagagctctttggttatgcaaaagacctccgaaaataacaaacaacaggcacaaaaacataaactaaacgctggtggagccaaagacaaacgaatcacgtcgctgcagctggtcaagtgaaatttttctttcgtaatgaaaatcaaacattatccgggcaaagccgtcgatgcgagtctctcgctggagggcagcagtgccatgggtgccctgtacgaggccaattggctgagggctgcgaatcagcccgccgctccagccacaacgggcaccaaattgagcaggcagagcagctccgccggcagcagtttcctcatcgagggcatctccgccctgagcaagtaccaaatgaccctggagaatatccggcagctggagctgcagtcgcgtgacaaacgcatagcgagcacgattaaggaactcagcggctataggccatcggcactgcagcatcatcagcagcagcagatgcataacgtttgggtggccgaggatcaggatcaggaacacgaagaactggaagatgcttcggagggaaaggagaagttggctagtatccaggaaccccctgcagttaaccactatgtcctggacccgacggagagaccaagggttcccagaccccggcaacagttctccgtgaaaccgccttccttgcgtcgctcccaaaccatgtcgcaaccgcccagttatgccaccttgagatcgcccccgaaaatcaaggaaaatcttagcaaaagttcctccgcctactccacattctcctcggctgcagaggattcccaggatcaagtagtgatctgccaacagccacagagactgatggctccgccacccagagaaccgcctccggagccacccaaaagggtatcgaaacccctgagcagatcgcaaacttcggttcagcggtacgccacggttaggatgcccaaccagaccacttcgttcagcagaagtgtggtcaggtctagggattccaccgcctcccagagacgtctcagtttggagcaggccatcgagggactcaaactggagggggagaaggctgttcgtcagaagagtccacaaatctcaccagctgccagcagtaatggcagctccaaggatctcaacggggagggtttctgtatcccacgaccgcgcctcatcgttccagtgcacacatatgcccgtcgacgcaggacgggaaatctcaaggagcaatccagcggtgggcaggaggaggaagcagagaagggtaaggggtggaaggatttctatgttttaagtcaggataggcatagtagcttttatatcaataggataggacagaattatgattatgattacccaattaattttaatatattttctccagatggacgcgtggaggtttcccgcgagggcaagtacctctccacattgtcgggagcgaaggtccttggcgaattggcgatcctgtacaactgccagcggacggcgaccatcaccgcgatcaccgagtgcaacctgtgggccatcgagcgccagtgctttcagaccatcatgatgcgaacgggcctgatccggcaggcggagtacagcgatttcctcaagagtgtgcccatcttcaaagacctggcggaagacacgctcatcaaaatctccgatgttttggaggagacgcactaccagcgtggcgactacatagtgcgccaaggcgcccgaggcgataccttcttcatcatatccaagggaaaagtgcgagtgacgatcaagcagcaggacacgcaggaggagaagttcattcgcatgctgggcaaaggggatttctttggagagaaggctctccagggcgatgatctgcgcacggcgaatattatttgcgagtccgccgatggcgtcagttgtctggtcatcgatcgcgagaccttcaatcagctaatttccaatctagacgagatcaagcatcgctacgacgacgagggcgccatggaacgcagaaagatcaacgaggaattccgggacattaacctcacagatctgcgcgtcatcgcaacccttggagttggaggcttcggtcgcgtagagctggtccaaactaatggagatagctccaggtccttcgcgctcaagcagatgaaaaagtcacagattgtggagacgcgtcagcagcaacacatcatgtccgagaaggagatcatgggcgaggccaattgccagttcatcgtgaagctgttcaagaccttcaaggacaagaagtacctgtacatgctgatggagagttgcctgggcggagagctctggacgattctacgggacaagggcaacttcgacgacagcaccacccgcttctacacggcatgtgtggtggaggcctttgattacttgcactcgcgtaacatcatctaccgcgatcttaagccggagaacctgctgctcaatgaacgaggatatgtgaagctggtggactttggctttgccaagaagctgcagacgggcaggaagacctggactttctgcggcactccagagtacgtggctcccgaggtgattctcaaccggggccacgacatcagtgcggattactggtcgctgggagtgctcatgttcgagttacttactggtacccctccattcacgggctcggatcccatgcgcacctacaacattatacttaagggcatcgacgccatcgaattcccaaggaatatcacccgcaatgccagcaacctgatcaagaagctctgtcgcgacaatccagccgagcgtttgggctaccagcgtgggggaatcagcgagatccaaaagcacaaatggttcgatggcttctattggtggggcctgcagaactgcacactggaaccgcccattaagcccgccgtgaaaagcgttgtggatacaacaaactttgatgactatcctcccgatcctgagggtccgccgccagatgatgtcactggatgggacaaggacttctgaggagaatcagaacccgtttcctagacgatgctctctaaacgcttctgctgcagaaaaccaggaggatatgaaagccagggaagaaaaattgatcttaagtgcgccatatgtacgccaaagccaacagcaacagtcagcagctcgcatcgaaaagctgccacaaaaaaaaacaaagaaacgtagcagtcgcaaggtcaagggccgacacaaaagcacaatcatccatcgtcgtagctccatttgagatttatagatacgtctccgtgatgttataaccatgatgtgcaacgcaatgaatttattaacgagtttataactattattttataatgaggatatatgtgtctagttcgcttggaattgatgtaaattgtaagtaggtctgtgactctgtttcagagctctgttagccatgtgcattgtataaattcagctatttgtatctattaaatatttttaacataattattacacatcattgttaaagcatacaaatcgggttgccttatagtctgtaagagaacatttgaaagcaacatttgaccaagatcttccgtcacacatttcttaaaattctatgtggcctctctactgtctttcattagtcttagcgatcatgtctattatatttacgaataacatgcc

SEQ ID NO: 136 - protein, 894 aa, Drosophila melanogaster; identical to SEQ ID NO: 132
  AAG22254
  GI:10727354

SEQ ID NO: 137 - DNA, 6597 bp, Drosophila melanogaster
  Name: Ac13E
  AE003499
  GI: 10728265
  Transcript: CT26306
gaattcaaatcgaatcgaataacgtacgcatagcgcgagaggcaaatttccaattgccaataaataacgaagaaaatacgacgaaaatgcttggactctaagtgaattgtttattttaacgttattgtcgcgcatttgccgaccattcgaatatatgtgcaatgtttaactcacgttcatggaatttgtgtggattgttattcgtcgcgccgccagtcggtgagctccagggcgatgccgccgggcgttctggtcaacgatagccgtgcgaactccaccgatgacatccagatcgccttggcgccccacatccagacctacctgagccagacgggccggcggcactcctgctgcagcgtgatgctcccagtggcattcgagcgggcggcggccaaatcctggctggaccccaagttcgattccccggtcctcgaggagcagtaccaggccagcgtctttccacacgtccgcatgcgatacaggttcaccctctcgtacatcctgctctgctcgctgatgtggtgcctgtactttgtggtggatggcggatcggaggacttctggcgcccaatctctagctccttttcgatgctctcgctggtcaccatcatggcgttgtgcttcacccattgggacctgtacagggagcaccgaacggtgacctcggcggtaactgcgctgctactttgcggcgcctcattggcattcctcacctacacgggccgggcgttcagtccgctgggtcatttcgccatctgcctggagatcgttctgctgatctacacggctctaccgatgcccttgtggctgggcgccagtacggcgattagctattcgattgccttcgagatggtctcgcacatggtaatcggatgcagtgcgattcatggaggtcccatgcacggcggaggtggagcagctgggggatcaggaatggaagccaacggagatcccagcaataggatactcatactgcggataatggcccatctgagtgtgcatttggtgggcgtgcatgtgctgatcatgaatctggtgcgcatgcgcggcaccttcatgaaggtgggtcagaatctcctcgtgcgtcgtcaattggagatggaaaagcagctcaaggagaagatgatacactcggtgatgccgccgaaagtggccgatatgctgctcaatgagggtggtccgtcgggtctggatgccggtggattgccaccggaatcccactacatgcgaccacgtgcctccaacgatgtgaagtccctgttccgaccattccacatgcacagcatggagaacgtgagcattctattcgcggacatcgttggcttcacccgcatgtcctccacgaaaacagccgaacagttagtggagatactcaacgatctcttcgagcgttttgacgacctttgctcgctgagtggctgcgagaagatctccacgctgggcgattgctactactgcgtgtccggttgtccagagccacgggcggatcacgccatttgctgtgtggaaatgggtctgggcatgattgatgccatgcgctgcttcgatgcccagcgccacgagggtgtcaagatgcgagtgggcgtccacacgggaacagttctctgcgggatcgtcggcacgaggcgggtgaagttcgatgtgtggagcaacgacgtcagcctggccaataaaatggaatcctcgggcaaaccggagcaggtgcacatctcgcaggagacatccagctttttgggcgatgcctactacttggaggagggcgaggaggtgtttggtcatcgtacttacttcgtggtgggaagacgacgcgacttcacacgaaccaatagcctgagtcccagcatgcctgcgaatgccactggcagttccctgctcttgcccggcgcccatggcgcctccctttcccagagtgccaccaatgtgtcggcggtgcagccgaacgttcctccggcctcgccggtgggtcagctatccagctcgctgaatccctcgccggtactctccatgcgaccgcgtctcacctcgttgagcatgaagatgcgtaagaagtcgcagagccgcgaccgggatgtggaacgtggcatcatccatccggcggcagcgggaattcctccggtgattgtggtgcgggaacgaccgaagatcatcattaccaccaagtccctgcccggcagtctggactctgatgaacaaccaccagtcagtccaccgttgctaccgccggcaaatccaccagcggccgaaacgcgatcgaagatcaagctaaaggtgtggaaaattcctcgattccttaagcgatttgaggatttaaccaacaggagcagctgtggcggcagctcctccgccggtcatctggacaaggaaagagagagggagcgggagaaggagaaggaggagctgcaccagcataatcaactgaatcccgaggagaccttggcattcatggacaaccagatgcaaaatggcaacggttgtggctatcagcagttgcccgttttggtagagtccaaccatcgcactcagaccctggacattccggccgctcgtccggtgctccatcatgcagctacatccacggcactggcaagcagtgtgctcagatcgccggaggcgggagtcagtggaggcgggggttgctgttctcctggtcagtactccatgtacgatgacatcatcgatgtgcgatcctacatcagtcagtcacggagcgatatatctccattcggtcgttcgggcagctatagatcgcaatgtggccgccagtcaacgggaggggtgaacggagcaggaccagcaggagttggggccgaaggaagagctggtacctcccagacagcgccgccagtagagcaatcgccactcccgcgaccacgagcatccaccttggcaaccggtagacccacaccgaatagcctggaaccgggcccttcctcaacgagtccctgttgcttgccagctccgggcaactccgtcggaggtggtggcatctttccgcccacgcactcccgccagtcgagcatctgcccatcggccacgtcgcgcaaggattccgggatcaagagcaactcgcgcagatcctcgatccaacagcaaatctatgcactcaaccagacggcgattagtcagcacagggtctccggttactttaccagctccacgtccagtatctccaatttgggagaggtccagggactgggtcttccgctggcggtacaaccgccaccgcctcttttgatgcccgcctgctcttcgcaaatggcggatccactggccgcctgcctgcagcaattgcgcaagcaatcggatcttcagcttatccgttgcgttcgggataatgccaggtcgcagaggagctatctggtcaaaccgccgttgcggaaattcagtttatacttcaagtcacggcagttggaacgcgatttccgctcgaaggcccatcgttttggagcggaaaatgagacggaaggaccgccgactttggccacgccacgctataatacctacattgatatattcgtggggattgcggtttatctgtgcatctccgtctcgctgtttttgatgacccagaacacggtgtcgcccagcttccggctgtgggtgaccttgttctcctgcttcacaggcatccaagtgttcgccctcttcctcttcacaaggcaaatgtgtcgccggcagagcggtagcaatgttagcaatcgattccgttccaagtcgacgaccagtgaggatttggagcgggatgagcgaggagctgcaccgggaggaagaccacattttgagtcctgtgccgatcgcattttcgaggccatatccagctggtatccgtggcacatttgcctggccgttctgatggccatgccagtgctgttgatcatcgccaactttctgctcctggacttggagcaactggaggcgtttgagtaccattatggattcctgatctttgtgtgcatcgtgcacttctgcaatttcacacagctgaattgttgggtgcggaatgtactggcctttttggcagccctctgctttattggcattgcagtgtcccagttgatggtctacagtcacaatcggagtgaccagcagcaggatcaggaggcgtcgaatttcatccaggagatcaagtggtttcaggactatcatgtggaaatctatctggatctgctgctcatcctggtgttggtctggttccttaatcgcgaatttgagattggttatcggctgaccttctacggcaatgcggtggccaatcaggataaggtccgagtgcagaacatgaagaaccaggccgacatgctgctccacaacattatacccaagcacgtggctgagcatctgaagaacacggccaagtactcggagaaccatcacaacatagccatcatctttgcctcgatcgtgaacttcaatgagatgtacgacgagagttatctgggtggcaaggagttcctgcgagtgctcaacgagctgattggtgactttgatgagctgctctcacgtccggaattccgggctgtggagaagatcaagacaattggttcgaccttcatggcggccagtggattggatccctcgcatcgcggcacgggggacgaacatattcacacactaatggagttctcaatcgccatgcaggaggtggtggatgccttcaacaaggatctgttggaattcaatctcatcctgcggattggcatgaacattggcgatgtgacggcgggagtaatcggtactagcaagctgtattacgatatttggggcgatgcagtcaatgtggcctccagaatggactccaccgggctacccaatcgcattcaggtgggcaaggattgcctgcccttcctcaccaatcgctatgagttcgagccacgtggcagtgtctatgtaaagggcaaagatcacatggaggtgttcctctacacgacacgaagagataatccactggatgatgacgaggctgataaggttgaacaattgggcaccaagaagatggagcacgaggggcgggatgaggatgtggtgcagggcgagcagcaagcggaggacaaagacgaggaggaggaggaagaggaggaggatgatgacttgcactccagtgagaccaccacgctcttcaagtcacaggaatcgctgcaggcgaatggtggcagccacttggcacccaacgccgcagccaccagccacacccacacaattaccctaaccaacaacaacaaccataacagcagcaacatcaacaacaacattgccaccagcaacacaacaacaacagccaacaacaactcaatgccagtggaaacttaggaaaattgcggggtagcaaggcacttgaaaaatggtttcaaaattgcatttaatgactctaacggtagggcagcaagtttcccggacaaccagaccatccgtcgtcgacaaccacaagtggctaagagtatggagctgttgccagaaaaccaaaccagatccaggggataaaaaatcggtggggcggggcgaggaattacccgaaggggtggggggttgaaaattaaaaaaagcaaccgtgttttttgtgatataaatgaatatgaatagatagaaacgttaggaacgatagaatcgggtaaaagttgctagtgattgattggttaattgattgatccatcgattgattgttgttaactgcgtttttcgggatggctaacgtgttggagcattgaaactccaaacagaagcagaccattcggcatatgcaaaatatgtgtgtgtttaagtgttactagccgccagttgactcatctgcacaaccaaacgaagtgctttctttccattctaccactgttttttttttcaaatagaattaactacacttaattaaactaatggaaatatgtggctttaaatggtagtagcgaaatatagatgtggattgtatgtagattcaatgtaccatagagttaacccactatgcatataagtaactaaataacaatttttttgagccaacgaatggatattacctgtatgtattggcccgttgttcgatgttgatcaatgtgtgtatataaatgtacgtagctaaagttaaacgattgctgattgtgtttcgcagacgaagatctgttgccatataagcggggttttttggggtcggattatttcggatttcgaagaatcataaccaaatgataatttcgtcgtctgtttttagctattacatcgcagtaaatggcgtggaaattggtttcccagtgtagcttcatatattttttttaaagttttttttctagtaaagcagttatacgatctacatatgtatgtagttataacatgcagcttttacataaaatgtaccccagcaaacgaccgaaaagtatgcaccaaaatgcttgccatacacacacaaagacacgcactcacccaccaaaaaaaaaagctttcaccacactcacgcacacacacacacacacacacaccaacccccaagacaccggaaaaaataattttatagccttttgtataatttttttatacaaacacaccttttgtgcaatgcaacattgccagtttctaatggtaaacttaagcagaactctatttccgccacgaaaaaaa

SEQ ID NO: 138 - protein, 1690 aa, Drosophila melanogaster
  AAF48468
  GI:7293083
MPPGVLVNDSRANSTDDIQIALAPHIQTYLSQTGRRHSCCSVMLPVAFERAAAKSWLDPKFDSPVLEEQYQASVFPHVRMRYRFTLSYILLCSLMWCLYFVVDGGSEDFWRPISSSFSMLSLVTIMALCFTHWDLYREHRTVTSAVTALLLCGASLAFLTYTGRAFSPLGHFAICLEIVLLIYTALPMPLWLGASTAISYSIAFEMVSHMVIGCSAIHGGPMHGGGGAAGGSGMEANGDPSNRILILRIMAHLSVHLVGVHVLIMNLVRMRGTFMKVGQNLLVRRQLEMEKQLKEKMIHSVMPPKVADMLLNEGGPSGLDAGGLPPESHYMRPRASNDVKSLFRPFHMHSMENVSILFADIVGFTRMSSTKTAEQLVEILNDLFERFDDLCSLSGCEKISTLGDCYYCVSGCPEPRADHAICCVEMGLGMIDAMRCFDAQRHEGVKMRVGVHTGTVLCGIVGTRRVKFDVWSNDVSLANKMESSGKPEQVHISQETSSFLGDAYYLEEGEEVFGHRTYFVVGRRRDFTRTNSLSPSMPANATGSSLLLPGAHGASLSQSATNVSAVQPNVPPASPVGQLSSSLNPSPVLSMRPRLTSLSMKMRKKSQSRDRDVERGIIHPAAAGIPPVIVVRERPKIIITTKSLPGSLDSDEQPPVSPPLLPPANPPAAETRSKIKLKVWKIPRFLKRFEDLTNRSSCGGSSSAGHLDKEREREREKEKEELHQHNQLNPEETLAFMDNQMQNGNGCGYQQLPVLVESNHRTQTLDIPAARPVLHHAATSTALASSVLRSPEAGVSGGGGCCSPGQYSMYDDIIDVRSYISQSRSDISPFGRSGSYRSQCGRQSTGGVNGAGPAGVGAEGRAGTSQTAPPVEQSPLPRPRASTLATGRPTPNSLEPGPSSTSPCCLPAPGNSVGGGGIFPPTHSRQSSICPSATSRKDSGIKSNSRRSSIQQQIYALNQTAISQHRVSGYFTSSTSSISNLGEVQGLGLPLAVQPPPPLLMPACSSQMADPLAACLQQLRKQSDLQLIRCVRDNARSQRSYLVKPPLRKFSLYFKSRQLERDFRSKAHRFGAENETEGPPTLATPRYNTYIDIFVGIAVYLCISVSLFLMTQNTVSPSFRLWVTLFSCFTGIQVFALFLFTRQMCRRQSGSNVSNRFRSKSTTSEDLERDERGAAPGGRPHFESCADRIFEAISSWYPWHICLAVLMAMPVLLIIANFLLLDLEQLEAFEYHYGFLIFVCIVHFCNFTQLNCWVRNVLAFLAALCFIGIAVSQLMVYSHNRSDQQQDQEASNFIQEIKWFQDYHVEIYLDLLLILVLVWFLNREFEIGYRLTFYGNAVANQDKVRVQNMKNQADMLLHNIIPKHVAEHLKNTAKYSENHHNIAIIFASIVNFNEMYDESYLGGKEFLRVLNELIGDFDELLSRPEFRAVEKIKTIGSTFMAASGLDPSHRGTGDEHIHTLMEFSIAMQEVVDAFNKDLLEFNLILRIGMNIGDVTAGVIGTSKLYYDIWGDAVNVASRMDSTGLPNRIQVGKDCLPFLTNRYEFEPRGSVYVKGKDHMEVFLYTTRRDNPLDDDEADKVEQLGTKKMEHEGRDEDVVQGEQQAEDKDEEEEEEEEDDDLHSSETTTLFKSQESLQANGGSHLAPNAAATSHTHTITLTNNNNHNSSNINNNIATSNTTTTANNNSMPVET

SEQ ID NO: 139 - DNA, 1806 bp, Drosophila melanogaster
  Name: CG2667
  AE003676
  GI: 7298935
  Transcript: CT9029
ttagtgctgactttccggttgctctttgacacgtactcgacttttccggacttttggttttcgcaactaatcaaagcctctctcttgcagccgaacgaagcacttcccaatcttcagaccctaaaggggtccaagtcgagcttgtttatggggtccactttattcggtttcgatcacttggcttccgcagaaaaggacaaggaggaaaagagcggcaaagacaaggagaagacgcccaccgacgagaccaaccgcaagttgcccatcatcaatcctctagtgcgactgcccaactggccaaatcttgccaatggcggtggctttatatccaaatgtcttttggccaatgctgataccctctgcgccgccgtcagtcccctaatggacccggatgagacactgctggccggttaccatgagaagtgcgtgatgaacaactactttggcatcggcatcgatgccaagatctcgctggacttccacaacaagcgtgaggaacaccccgaaaagtgccgatcacgagcccggaactacatgtggtatggggttctgggatccaagcagcttctgcagaagacctgcaagaatctggagcagcgagtacagctcgagtgcgacggtcagaggattccgctgccggaactgcagggaattgtgatactgaacatacccagcttcatgggcggtaccaatttctggggcagtagcaagaaggatgacatattcctgccgcccagcttcgatgatcgggtgctagaagtggtggctgtcttcggatcggtgcagatggctgcctcgcgtctgattaatctacaacatcatcggatcgcccagtgccaaagcgtacagatcaatatcctgggagacgaggagatacccatccaggtggacggagaagcctggcttcagccacctggaatgattcgcattctgcacaagaaccgagtgcagatgctatgcaggaacagaagcttggagctctcgctgaagagctggcaggagaagcagcgccagcacagcatctccatccagagggatgcatcttctacagcttcagagcatgccaactccacggacgaggtaatctccgaacgtgaatgctacgtgctcctcaacttcatcgaagccgtcagctcgttggtgaagtgggtcaagttcctgattatctcgcatccggccctgcagcacgacctatacgaggtggcctgccgggccagtgaagccctggaatcgattcatccgcagggcaaactactcgaaggtccttcgttgcgcaccaagttggtggaagtcatagactcatcgcggcagctttacgatgatgcatgcaccctgctgcgcgaccgaggtcatagtttgattctccgtgaggatttggaaacaaagctcagcgcggcattggccaacatggaaatggagctgaaaaagtgctccgtgcagaagtgcattgatggaaagctgcgggcctactttaatgttctggcgcccaacgaagagtccgatggccgccgaaagtctcgacctttctgggtgagattgcgttccggttcgaccgccggtcagcaggcgtttaagccacctttgaccaacacccgcgaggcggccaacaactggagcgtcaacgaggtggtcacctggttggaaacgatgcagctgtcggagtacgtggacagcttcctgaagaacgacattcgcggcaaggaactgcttaccctgggcaggcgtgacctcaaggatcttggcgtggttaaggtgggacacgtcaagcgtatactgcaggcaataaaggatctcagcgagaactag

SEQ ID NO: 140 - protein, 1859 aa, Drosophila melanogaster
  AAF54154
  GI:7298950
MTRGSCISSPIPAYCAFTAEQNGQRRLSLLFYTDVSRFYGFIFLQVETRRAGTAKIAMQHRERIITPTRSLVLCAESRREMEDWLGSLKTATAPQRPRGDSFLIEQHDILSNHHHWYATSHARPTYCNVCRDALSGVTSHGLSCEVCKCKVHKRCAAKSIANCKWTTLASVGKDIIEQADGIIMPHQWMEGNLPVSSMCAVCKKTCGSVLRLQDWRCLWCRATVHVACRPQMAVACPIGPAKLSVVPPTSVHSISTDDAWDVASPKGNFSPLLVFVNSKSGDNQGVKFLRRFKQLLNPAQVFDLISTGPSLGLRLFRHFEMFRILVCSGDGSVGWVLSEIDRFNMHKQCQVAVMPLGTGNDLARVLGWGSSCDDDTHLPQILERYESASTKMLDRWSIMVFEKAIPVPKTPKMSISTEQEAMLTGMVTSANHHLRFIVETNDTQTLIRSTRNLCDTVDDLVCRISEHHKDDEQLAVKCDILRQKLNMLLDALQEEEIGAHSGDDLIATIRSLIARSIPVTPGSNAYLLNPNISIEKTEKDQINTKERRNSRSLRSSEKEALQCRANSVKRAIYNVVEHSEPGRPKRYQRKLSITPFEALKLPTASGESTPCTSPLPIIPPINIISPTMETSRLTCISPLPDTRRDSVDENFFNSINLPAPRQFADSRRSSGVEVIQEIEEGANGETVYRKSRMSLTGGANIDDAGNRLSPCSDAGENTPTERKVDFLRVPIHTGEPIVDPLCDYRPHEVFERTYYMTREMDKGKEKDKEKDKPVEIDKEKDTCVEKEGSMPAEKLVHTCNLQVPGVVVTPNPQNVYSSASITIIDTDAQTTTEQSSSDDLGGEASDVLSAISNEECSVASEIFDKQDAGQTVGDIIQNMDASNFTHIDSPETSDETEAMPGESIMDDISSVLGHDITYALQDNTLTDDTTTLCSEHAGPPKPPRKKSLSALSRTQAHPRRRNSSPPRMARLARMDSDDNPQQFGFENIVFEIDNRCDDQKMREPPRYCSLAQFVEGNDIARQSFKQLMLEQHRGGDNDSDYPEHEQTPTNKGANLLATTSEDELSTQTAIKIEIQDIDATVRNLNSSMKPNTILTTSTSPTKKSGHGQDISVVVRPPTPLRGDCIKPTVSLLPVSSGGAMTVSMTCSGMLGVRAMNASEIRRHSSHAPGLAVREFDKDKDRRHSGFNPNQLTLDPEHARFLSSSPAASRRISCGSLFKKNKKIGTKRSYGLFSVRFFVVAEPDFRLATLALIRPLIPLLVLTFRLLFDTYSTFPDFWFSQLIKASLLQPNEALPNLQTLKGSKSSLFMGSTLFGFDHLASAEKDKEEKSGKDKEKTPTDETNRKLPIINPLVRLPNWPNLANGGGFISKCLLANADTLCAAVSPLMDPDETLLAGYHEKCVMNNYFGIGIDAKISLDFHNKREEHPEKCRSRARNYMWYGVLGSKQLLQKTCKNLEQRVQLECDGQRIPLPELQGIVILNIPSFMGGTNFWGSSKKDDIFLPPSFDDRVLEVVAVFGSVQMAASRLINLQHHRIAQCQSVQINILGDEEIPIQVDGEAWLQPPGMIRILHKNRVQMLCRNRSLELSLKSWQEKQRQHSISIQRDASSTASEHANSTDEVISERECYVLLNFIEAVSSLVKWVKFLIISHPALQHDLYEVACRASEALESIHPQGKLLEGPSLRTKLVEVIDSSRQLYDDACTLLRDRGHSLILREDLETKLSAALANMEMELKKCSVQKCIDGKLRAYFNVLAPNEESDGRRKSRPFWVRLRSGSTAGQQAFKPPLTNTREAANNWSVNEVVTWLETMQLSEYVDSFLKNDIRGKELLTLGRRDLKDLGVVKVGHVKRILQAIKDLSEN

SEQ ID NO: 141 - DNA, 1152 bp, Drosophila melanogaster
  Name: CG7842
  AE003525
  GI: 10727872
  Transcript: CT23794
ccttcaacaaaaatgttggccgcccgcagattactacgatcaccgcggattaccggtgccctaagctggtcccgctggagcagcgatgccgcgaaggccacaacagaaacctccgcccttttgcagaacgcggagaagcggcagcaactgctcaacgagctttctgagccgctggaacagaaaggccggcccgccatcgatcccaaggaaacaagtgtgatgctctttcccggtcagggcacccagtacgtgggcatggccaaagacctgctccggttcccgggcgcccgtcgcatcttcgagctggccaacgaggtgctgaaatacgatctgctcaagatctgcctggagggaccacgtgagaaactgaatcgcacggagcacgctcagctggctgtgatggtatcctcgctggcagcactggagcagttgcgtgaggagcgacccaaggccattgaaacgtgtgtagctgccgcaggctttagtttgggcgagattaccgcattggtgtacgcggatgccctgcctttcgacaaggcattgcgattggtgcaggtgcgggccaccgccatgcaggcggcatgtgaccaggcagccggagccatggcgatgactctctacggaccggataccaatctgggagaggcctgcgctcgtgcgcagcaatggtgtctggacaaaggagtggagtcgccctactgtggcatcgccaactacatgtatccgcactgcaaggtagtggccggcaacgtagaggccctggagttcctggaacaaaatgccaagtccttcaaaatccggcggatgaagagattggctgtcagtggcgcctttcacactcctctaatgcaaagcgccgtggagccatttaccaaagccctgaaaacggtgcgacttcaggaccccgtcattagagtgtactccaatgtggatggcaaaccctatcgccatgccaagcacatcctaacgcagctgcccaagcaaatcgtgaggcccgtcaagtgggagcagactctccacgagatgtacgagcgcaagcagggcgtcgactttccacgcaccttcgaatgcggtcctggcaagggcctggtccaggtcctggaaaaagtaaatgccaaggccgctcaatccagctttaatgttatagcctaa

SEQ ID NO: 142 - protein, 379 aa, Drosophila melanogaster
  AAF49377
  GI:7294021
MLAARRLLRSPRITGALSWSRWSSDAAKATTETSALLQNAEKRQQLLNELSEPLEQKGRPAIDPKETSVMLFPGQGTQYVGMAKDLLRFPGARRIFELANEVLKYDLLKICLEGPREKLNRTEHAQLAVMVSSLAALEQLREERPKAIETCVAAAGFSLGEITALVYADALPFDKALRLVQVRATAMQAACDQAAGAMAMTLYGPDTNLGEACARAQQWCLDKGVESPYCGIANYMYPHCKVVAGNVEALEFLEQNAKSFKIRRMKRLAVSGAFHTPLMQSAVEPFTKALKTVRLQDPVIRVYSNVDGKPYRHAKHILTQLPKQIVRPVKWEQTLHEMYERKQGVDFPRTFECGPGKGLVQVLEKVNAKAAQSSFNVIA

SEQ ID NO: 143 - DNA, 1705 bp, Drosophila melanogaster
  Name: CG17486
  AE002751
  GI: 7289853
  Transcript: CT38665
aacgtcaataatgtgtggaatattttgttcagtcgtgaacaatgttcctttaaactcctttaatatttctagcgctctgaaagtaattctgaaaaaccgcggtcctgatgtgcaagacgaggtggttatagattattgttttggaaaaattttatttgctggcttcgtgttatggcaacaaggggaaagtgtacaaaagcaacctgtggtggaggacgattttatatttcttttcaatggagacatttacaatacttcaaagcctgaatatatgtctgacacgacttggatagcggaaaggctagctgaatgccgttgtaaagaacagaatattttgaagatacttaagcgattggagggaccacattgtttaataatttatgacaaacgagaacaaatcctttactttagtcgcgacgcacttggaagaaattcactattaattgaacgcatttgtaatggcttccaattattgagcacatcacattttgaagataaaaaaatatcactggaattgcccccattgggtctttttcgagttaaactaaatgatctgaattcgtgcgtattgtatccatggcagcccctcaataattattcgactcagcttttacgcaaccttgatcttgcgattgggtggaaaactgcagtagagagtccaatgtcgccagattggatgttaaattgcaaccccgcatttagttataacttctatgaatttcaatacatcaagaataacgtgaacctttataaaaacttaatagatcagtcagaaattaagtatactctatctattctccatacactgctatccgattcgataaaaaatcgtgttagaaacatggctccattttgcagactctgcatgcaaaaattaaatatatcgcctccatgcagacacgcaaaattgtgtattctattttcgggtggccttgactgtacaattttggccttgctggccaaccaatttgtaccagtaaatgaacccatcgaacttattaatgttgctttcgaaagcgttaagggccaaaatatatcggaaaagctttttgatgtaccagatagaaaaacgtcattagtatctgtcaatgaactaaaacagctttgtccggagaggtgctggaatctactgaaagtgaatgtaactcgacttgaattgcagcagcacctaacatcacgtataaagcatcttatatatccgctagatacggtattagatgagagtcttggatgtgccttctggtttgcttcgcattgcactcactctactgctagagtcgctcttatcggaagcggggcagatgaactatttggtgggtatacccgctatcgcaacagttatagccgttgtctgggaaacgatctggagcgccaacttgctgtgcaaaacgaacttgaaagggactggcaacgtatttcggcccgtaatttagccagagatgaccgcattattgcagatactggtaaaacagcaagatccccattcatcgaagagaactttgtaaaatttataagatcgttagaagtgtatcaaaaatgttgctttggtttcccggaaggagtcggcgataaattacttctgagactgtatggctatcaaatcggtttgcgagatgttgtgttcttaaagaaaagggctattcaatttgggtcccgaattgcaaacaaaaaacaaaatggctctcatcaatctgataatctttaa

SEQ ID NO: 144 - protein, 564 aa, Drosophila melanogaster
  AAF45462
  GI:7289856
MCGIFCSVVNNVPLNSFNISSALKVILKNRGPDVQDEVVIDYCFGKILFAGFVLWQQGESVQKQPVVEDDFIFLFNGDIYNTSKPEYMSDTTWIAERLAECRCKEQNILKILKRLEGPHCLIIYDKREQILYFSRDALGRNSLLIERICNGFQLLSTSHFEDKKISLELPPLGLFRVKLNDLNSCVLYPWQPLNNYSTQLLRNLDLAIGWKTAVESPMSPDWMLNCNPAFSYNFYEFQYIKNNVNLYKNLIDQSEIKYTLSILHTLLSDSIKNRVRNMAPFCRLCMQKLNISPPCRHAKLCILFSGGLDCTILALLANQFVPVNEPIELINVAFESVKGQNISEKLFDVPDRKTSLVSVNELKQLCPERCWNLLKVNVTRLELQQHLTSRIKHLIYPLDTVLDESLGCAFWFASHCTHSTARVALIGSGADELFGGYTRYRNSYSRCLGNDLERQLAVQNELERDWQRISARNLARDDRIIADTGKTARSPFIEENFVKFIRSLEVYQKCCFGFPEGVGDKLLLRLYGYQIGLRDVVFLKKRAIQFGSRIANKKQNGSHQSDNL

SEQ ID NO: 145 - DNA, 2497 bp, Drosophila melanogaster
  Name: CG6969
  AE003740
  GI: 10726705
  Transcript: CT21569
atgacggacgaaacaacgccgcttaccgatgccgttcccagtggctccggatatgttgtcctgccgccgtatcagggaccggagcgtgtctttccgggtggtgtttctccgcgtgcgcgacgcaacaagatgcgacagttccagtgctgcatgggcatcacctttatagcgattgtatttaccgccctgtgcctggcactggtgttcagtgattccctgggcggagcggatggaggtcccagcttttttttcgtcgtcaatggatcggatagcgaattggccccaaataggccactgccagacgaaccggctgcggaatgggcgctgcagcaggcggcactgggtcatcatgatggtgctcaggcagtcagtgctgggattaaggcactgggagatcgggaaatactggaggagggtctgcagccgaacgaggtgaatacgccgtccttccgacactatcgttccctgagcacaaatccagaggcaaggaagctggcacgtcgcggctatgtggagaaccaggccaccatagacattgccaagaggtttaactacaccaaacagccgggacgcagcaacattggttggggacccaagatagttctgccagatcctacggtactccgtttggaatgcgatttcaatgcgcgctacagaagatccaccggggtgtgtaacaataaacaacatcccaggacctacggagcatcgatggttccatatcgtcgcatggtgtcgccggactatgcggatggtattgctgctccgcgagttagtcatcatggacggttaccgccggctcgtcaggtctctctgaaaatccatcgttccagctacgaaacggactcgaattttacggtaatgctggccgtttttggtcagttcatggaccatgacatcacagccacatcgctgaccacttcgcaggagggtgagtccatcgattgttgtgtggctgccacccgcgagcagcatccggaatgctatccggttgatattctgcccgatgatccctactacaagcagtacaacatcagttgcatgaatttcgtgagatctgctccagcgccaacgggtagatttggtccacggatgcagctgaaccaggccacggcatttatcgatgcctccgtcgtgtacggcaatctggagcagcggcaaaatcagctgcgcagctttatcaacggatctcttcggatgtttgtcacggatgatggtcgccagctattgcccatttcctcgaatccggcagatggctgcaatcgtgtccagatgactcgactgggtaaatactgtttcgagtccggcgatgatcgggccaatgagaacctgttgctcacatctatgcatttgctgtgggctagacatcacaactatttggctcgacaattgcaggagcagaatccacattgggaggatgagcggctctaccaggaagcccgaaagattcttggtgctcagatggcacacatcacctacaatgagtttttgccagtgctgctggggaagaatatcagcgaggccaagggcttgctgcctgccaaacacaatctaaatgctccggatacgtatgacccggaggtggatccaagtattgccaattgctttgcagcagccgcatttcgatttgcacacactcttctaccgggattgtttaatatctcgagggataacagcactcccgaggccatcgaactgcacaagatgctcttcaatccattctcgctctgggcggagcatggcattgaccacgccctgatgacagcggccaatacgccggtgatgcaagtggatcgcttcttttcactggaagtcacgcaaaagcttttcgaaggcaccgcagaggatagggtgcctctttgtggactcgatttggtatccttaaacattcagaggggtcgggatcatggcataccctcgtatccagtcttccgtcgccattgccgcctgccgacggtggacacgtgggaggagatgtcacaggccattgacaacgctactctggactccatccggcagatttatgaatctccgcaggatgtggacgtctatacgggtgcacttagtgagccgccactggatggagctatttttggtccgttgctcagctgcatggtttccgaccagttcctacgcctcaaactaggtgactcccattggtacgaacggaaaatgggcccacagaagttcaccaaagctcaattggcggagatctacaagaccagtctggccgccatcatttgtcgcaactcagatggaatcacccgagtgagggagcatgttatgcagagactgcgcgatggaggtaatccccatgtggattgccaggacctggagggattccatttcaatttcgaaccctggtccgagaagcaacagccccaggatcttcatagtgccggcataagcaggggatccacttcggtgcgagtaatgtccaaggcaaatcatcaagcccacaacgtaaccctacatattgataaaggaatctagttag

SEQ ID NO: 146 - protein, 830 aa, Drosophila melanogaster
  AAF56043
  GI:7300903
MTDETTPLTDAVPSGSGYVVLPPYQGPERVFPGGVSPRARRNKMRQFQCCMGITFIAIVFTALCLALVFSDSLGGADGGPSFFFVVNGSDSELAPNRPLPDEPAAEWALQQAALGHHDGAQAVSAGIKALGDREILEEGLQPNEVNTPSFRHYRSLSTNPEARKLARRGYVENQATIDIAKRFNYTKQPGRSNIGWGPKIVLPDPTVLRLECDFNARYRRSTGVCNNKQHPRTYGASMVPYRRMVSPDYADGIAAPRVSHHGRLPPARQVSLKIHRSSYETDSNFTVMLAVFGQFMDHDITATSLTTSQEGESIDCCVAATREQHPECYPVDILPDDPYYKQYNISCMNFVRSAPAPTGRFGPRMQLNQATAFIDASVVYGNLEQRQNQLRSFINGSLRMFVTDDGRQLLPISSNPADGCNRVQMTRLGKYCFESGDDRANENLLLTSMHLLWARHHNYLARQLQEQNPHWEDERLYQEARKILGAQMAHITYNEFLPVLLGKNISEAKGLLPAKHNLNAPDTYDPEVDPSIANCFAAAAFRFAHTLLPGLFNISRDNSTPEAIELHKMLFNPFSLWAEHGIDHALMTAANTPVMQVDRFFSLEVTQKLFEGTAEDRVPLCGLDLVSLNIQRGRDHGIPSYPVFRRHCRLPTVDTWEEMSQAIDNATLDSIRQIYESPQDVDVYTGALSEPPLDGAIFGPLLSCMVSDQFLRLKLGDSHWYERKMGPQKFTKAQLAEIYKTSLAAIICRNSDGITRVREHVMQRLRDGGNPHVDCQDLEGFHFNFEPWSEKQQPQDLHSAGISRGSTSVRVMSKANHQAHNVTLHIDKGI

SEQ ID NO: 147 - DNA, 1463 bp, Drosophila melanogaster
  Name: CG12262
  AE003558
  GI: 10728071
  Transcript: CT16549
tttcgctggcagccaccgacgagttagcaaggcgacctagttaaaactcaggaaaatacgaaaataaacccacattcaaatggcgttcctcaacaagcttgctgcgcctgccctgcgccagttggtgtcccaaagtcgcgcctacgccgccgtgtcacacgtttcgcccaatggcacctctttcgcactcaccgaggatcagctgcagctgcaggaactggcacgtaagttcacccgtgaggagatcatcccggtggccgcccagtacgacaagagcggcgagtacccgtggcccatcatcaagaaggcctgggaactgggcctgatgaacaaccacattcctgctgatattggtggcctggatctcgatgtgttcaccacctgcttgtcggccgaggagttggcctatggctgcactggcatcatgaccgccttagaggctagtggtctgggccaaactcctgtgatcctgtccggtaacaaggaacagaagaaaaagtacctgggccgcctgctggaggagccacttgtcgccgcctattgtgttacagagcccggagcaggatccgatgtgtccggcatcaagacacgcgccgagaagaagggtgatgagtgggtaatcaacggccagaagatgtggatcaccaacggtggtgtggcgaactggtactttgtgctggcccgcaccaatccggatcccaagtgcccgcccagcaaggccttcaccgggttcattgtggagcgcgacagtcccggactaacgcccggccgcaaggagttgaacatgggacagcgcgcctccgacacgcgtggcatcaccttcgaggatgtgcgcgtgcccaaggaaaatgtgctgattggcgagggtgccggtttcaaaattgccatgggcacctttgataagacgcgtcctccagttgctgccggagctgtgggtttggcccagcgttgcttggatgaggctcttaaatacgcgctggaacgcaagacctttggcgtgcccatcgcttaccaccaggctgtgcagttcatgctggctgatatggccatcggtgtggagacatcccgtctggcgtggcgtctctccgcctgggaaatcgaccagggacgccgcaacagctactatgcctccattgccaagtgccatgccgccgatatggccaacaagattgcctccgatgccgtccagatctttggaggcaacggcttcaacagcgagtatcccgtggagaagctgatgcgtgatgccaagatctaccaaatctacgaaggtacttctcagatccagcgcctcatcatttcccgaaacatgtacgaggctgctaagggtcaagcctaagtcagttttaactaggattcctcatctccattcacctcatcagttgtcatgctcattgtagacacattcacaaatccgattaataaagtacaataagtaaataattacaagaaaatataaatca

SEQ ID NO: 148 - protein, 419 aa, Drosophila melanogaster [sequence omitted]

SEQ ID NO: 149 - DNA, 2502 bp, Drosophila melanogaster
  Name: fray
  AE003722
  GI: 10726601
  Transcript: CT23267
gctgaattttggttgtatatttatttcgtgccgtcgaatcgcttcgctaagctgactttttgactttttcgtgtagtttgcactcgaaaggagaaagaaatcagccgaaatatatcccccgaagatattggcgatagcccggttggcgtatatattccagtgaatcggtggattgccagcaaagcagccaaaagcaagaacaacatcgaaaaacgtttcgtcacgctgagagagcagtggaattttttcgcaacaaatacaattaaaagttgcacgcagaagtggaggaagaggcgacgaaagtcagaaaatcaatttgtgaataatacgaaatcggtgcaagataagttcccgtgtgaaattgctttttcggcgattggattttcatcgattttgcaaagggaaaacagaggtggcacacatcgccaacaacaacaacaaccagaaccaaagcaaagaatcccaagaaagagatccgaaggatacaggaatctttggatgttttgccaagaaggaagagcagcagcataatcctaaaaagaaacaatcagaaggacccagagagagttccaactcgggcagctataaagtccagcaaacggagcaagaacaacgaagggaatcggagaacgagcatccatccgtttaccgccagcaggacgaggagtttcatccgataaaaaaggaggagccccagaaaaccccacccatatccaagcaaccccgtccgcggaataccccaagatcgcaaagtcagccggctattaacaaccgacgacgtccaggaaccccgccgcctcacacagtcgcacctggaaacggaaccgcaagcagcaggagcatgacctccatacccgccaatctgtctagcaataatgttgctggtgcagcaaccttaccaggagctgcggcaccgccagagaaatatacatggccgaactccaaggacgattacgagctgagggacgtcattggtgtgggtgccacagccgttgtccatggggcttactgtattccaaggaacgagaagtgcgccattaagcgcatcaacctggagaagtggaacacatcgatggacgagctgctcaaggagattcaggccatgtcctcctgttttcacgagaacgtggtgacctatcacacctcatttgtggttagggaagagctctggttggtgctaagacttctagaaggcggttctttgctggacatcatcaagcacaagatgcgaacgtccaactgcaaacagggtgtcttcgacgaagccaccattgccacggtactgaaggaagtcctaaagggattggaatatttccattcgaacgggcaaatccatcgtgatatcaaggccggcaatattttgattggtgacgatggcaccattcaaatcgctgacttcggtgtgagtgcatggctggccactggcagggatttgtccaggcagaaagtgcgccacacctttgtgggcacaccgtgttggatggctcccgaggtgatggagcaggatcatggctatgactttaaggcggacatttggtcctttggaataacagctatcgaaatggccacgggcactgcaccataccataaatacccgcccatgaaggtgctaatgctgaccctgcaaaatgatccgcccaccttggacacgggtgcggacgataaagatcaatataaggcgtatggcaagacattccgcaagatgatcgtcgagtgcttgcaaaaggagccatcgaaacgtcccacggctagtgagcttttgaagcacgctttcttcaagaaggccaaggatcgcaaatatctcacccagacgttgctgcaatctgggcccagtatggagaccagggttcacaaggcggcgaaacgccaaccaggagcctcgggccgtttgcatcgcacggtgacaggcgaatgggtctggtctagcgaagaggaggacaatggtggctctgccaccggttccggaacaggagacagaaaacatccatcttcggactcggattccgaggatagacccatgaatcgattggaaagagccgactcatcggacagcgaccgggaagagccttctcccgaaataacccacagtgtttcctcagccacagtgacgcctggagctccagctgctgctggtgctggtgcagcccaagagctaacagctggcattgctcaattaccactacctagcgaagcggccggcgaggcgccaccagtcaatcttgtccttcgcatgcgcaacttgcgacgtgaacttcacgacattcgcttcgagttcgttgtgggcaaggacactgccgagggtatcgctacagaactggtagacgccggactcgttgatgcgctggatacccaaccgatggcaacgcatctggatcaactgatagctgccagtgcaacgatgaaaacgattactttccaattgagctccggcgtgcagccgggcgaagtgcccgacgaacgatcactggtgggatatgcgcagatctccatcacggactagtg

SEQ ID NO: 150 - protein, 552 aa, Drosophila melanogaster
  AAF55567
  GI:10726604
MTSIPANLSSNNVAGAATLPGAAAPPEKYTWPNSKDDYELRDVIGVGATAVVHGAYCIPRNEKCAIKRINLEKWNTSMDELLKEIQAMSSCFHENVVTYHTSFVVREELWLVLRLLEGGSLLDIIKHKMRTSNCKQGVFDEATIATVLKEVLKGLEYFHSNGQIHRDIKAGNILIGDDGTIQIADFGVSAWLATGRDLSRQKVRHTFVGTPCWMAPEVMEQDHGYDFKADIWSFGITAIEMATGTAPYHKYPPMKVLMLTLQNDPPTLDTGADDKDQYKAYGKTFRKMIVECLQKEPSKRPTASELLKHAFFKKAKDRKYLTQTLLQSGPSMETRVHKAAKRQPGASGRLHRTVTGEWVWSSEEEDNGGSATGSGTGDRKHPSSDSDSEDRPMNRLERADSSDSDREEPSPEITHSVSSATVTPGAPAAAGAGAAQELTAGIAQLPLPSEAAGEAPPVNLVLRMRNLRRELHDIRFEFVVGKDTAEGIATELVDAGLVDALDTQPMATHLDQLIAASATMKTITFQLSSGVQPGEVPDERSLVGYAQISITD

SEQ ID NO: 151 - DNA, 4391 bp, Drosophila melanogaster
  Name: CG6879
  AE003749
  GI: 10726756
  Transcript: CT21312
atgcccgcctcggagcggtaccgcacccacgacggcacctgcaacaacaaacgccggccgcgatggggtgccgcccagatgcccttcaaccgcttcttgccgccagagtacggtgatggcgtggacactgttcggagttccgccgatggcagcaccttgtcctcgtcgcgattcgttagccttttggtgcacggagcgcgggagggcgaggcaccgctcaccctgatgatcgcccagtggggtcagatgctagaccacgacatgacctcgacggctcagccgcgttccatcaatggttccatacccagttgctgtggcggcaaggacttccatcccgcctgctttcccatcaaagtgcccctggacgatccttggctggcgccgctcaaggttcgctgcctggagttcctgcgctcggctcctgcccagcgacgcgactgtgtgctgtcctggcgggagcagaccaaccaggtgacctcatacatcgacgcctcgcccatttactcgaacagcgccaagtcctcggacaatgcgagagttttccggcatgggctgctcgtctatgggcgcggtgatcccgccgaggatgtgtgccaacgcggcgctattgccaccaagtgcattcgttccggagatggacgcagtggtgagcagccgggattgttggccatgcaccacgtctgggtgggggaacacaaccgaattgccatggagctgagcgaactgaatcctcactggagcgacgagaaggtgtaccaggaaacgcgcaggattgtgggcgccatgtttcagcacatcaccttccgggagtttctgccggtcattttgggcagggaggtggtcaagctcttcgatctggagctgatgccctcgggctactacgaacgttatagttcaaaggtcaatcccacggtggccaatgcctttgcagccgccgccttccgttttggccactcgctggtccagaactcctacactcgctgcgatcgtcatcacaatgtgatcaataacaatgtcagcctgcatgaggagttccagcgaggtgacattggttcggcgggctcactgcatcgtctgctacgtggcttggcctcccaaagggctctgaagagggatgagttcattacccccgagctgaccaatcacctgttccagactcctggctttccattcggcttggacctggctgccatcaacattcaacggggcagggatcatggcattgctccgtacagcgcctggcgagtgccctgtggtctaagtcccatcctcagttgggatgacttcgctaacgtggtgggtccggagtccgccaagcgcattggccacgcctatcgcagcgtgcacgacatcgatctgtttgtgggcgggatcgcggaacgtcctgtggtgggtggcctggtgggtcccaccttcgcctgcatcatcgcccagcagtttagtaactccaggcggggtgaccgcttttggtacgagaatggtggcttcgagagctccttcacgcccgcccaactgcactccttgcgccgcgtgtccttggcccaagtgctctgccgcacggtgggtggtggcaccctccagccccacatctttattccagcggagttcgaggacaatgagagacagacctgtggtgtgggcagtctaagtcccatcgacctaagtccgtggttggagcaggatccctttcacaatcagcaggtgcccgaacaggtctttaccattgggcaacccgagttgggatccgttcagatcataaaggaggacaaggcgggcttctccaaccgggtgaaacccatcaagccacaggtggaggttagtccctcgtcacttagcggcttccatcgacccaccaacgaaaacttgaccaaagttagtgacaaacttgacctaagacgcaagacggtgaccaaaaagaacaataccaacaacagacaacagaccactagaaaacccgtgggtggagtaaacaacaagctggacaagtcccccaaaatcactttaaacatcaagagcgtaaatgtgagaagaccagagggatcgggactcaaaagaagggtgatcatcaacaatgtgcccgtagagctgcgaagctctggaggtaatgccacggctgaggagacagaaccaggaaatttgacagacgaagacgacgagtttcacgacgacgcaggcgaagtggtggacatggaggacatagtggaagtgagggctagcaaggatgatccatcgaaactgaccaagacggacttaaaccaaaacagaaatgattcgaagacaactgaaacagaacagactgaaaagaacactaccatcgaacccacggaagattctactgatgaaccaaaaactgaaagacgtgacgccagaaagatggaacctcatccagcagcaaagactccggacaagacagcagactctagactattgcacaaccaacgcaaccgtaccactaccccaagggacttccaagccagctccaccgtgagcctgaaacgcttcacgcgacagacgaaggcaccgaaggttagtaagcccaccaaaagggccgaggaactgagacagtaccagaacagaccgctctacgagagaccccaaaaggtggtggtcaacggaccgaacgccgaccagtacgagattgagatcaacatacgacagacgaacaagaatcccgcatcacgaccatcgacttctgactacgcgcaatacacgactgccaacaaaccgtactataactccaactacgcaccacactacatggactacgccagtaccacaccaattccattgcccagctatggctaccatcaaccgattggggagatcagtaaccagggagtaagaacgaagccaccgaccatcatttatctgaacgacaacgacgaccgacggaccacaactcgggcgccgaacatcttccaaaactttctgacctttgccacgaacagtttcaatcccttggggataagacgacccatgcccacgactccatccccgatctcgcagagccacaaggagccaggacagttcgagaacaatgtggttcacagtccgatcagtaactcgcacatactgactggaggaggtccgtccgcctcgtactcaccgcgaccgccgtcggtgcactcgtatccggtggccaccagttcccagattggtggcaatcccggatcagggttcctgcacgcttccagcagcgcagttagtgcagggcactttggcagcatttcgggagtggccactgccaatggagcggacagcacatttagcttcaacatacggccacgtcccagtccggatttgggttcagtagtgagctcctatccacgaccggtttcaagtcagggcggaggttcatcttacagacctgactacgctcctacccagagcgaactgtactatgacagagaactgatcactgaccgaaatcccagcccattttccggatcaagttccgcccaaagaccacatcaacagacattctacggacggagcccggaactcaaggaagtgggcaacaatagcaacgaactgacccatacggagcacaaactgtacctacaggactacgactatgccagcagaacgctttctaatctgaccacggacgagagtcaccaaactgatgacgacaccgattacgtatacgacgaagacatagccagcaatgacctggataagacgaagacccgaaaggagacggacctcaacgaattgaccacaaaaaagttcgaccaggacggctacatgcgaccacaacttatgcgagacgcgacccacaactcgaccggatacaacgtgacctcactggacgacaactacgtaatgcccatgctggagaacaggacgcggacgaactatgtgaccgaggtgcccaagcccatgctgtccacctccagccggagtgtgacgaacagcaaggtgaccgtctttccggacagcctagggaaacagttggccaacgacatccttgcggacgaggcgacggacgactacgtggacgcgaatgggcatacagaagcgcgactaaaggcccagaaactaaagcaactggccagtgtggcgttcgcaccaattaccgtactgaccaaaccggacagaccggacaactgggtgatctacaacaaggccagcgaggagccaccactgccacaaccgccagcagtcaacatggatgtggcgcccagcggagaggtgcccactccgatcaagaacttcaacaatgcgtggctaaagcaggatctaaaggctcggccggagacaccacctaccagattggcggaagaggtgaccacggtggcggcagcggacagtatctagaaatgccaaattagccctagattgattatttatttatttatacttcaaaggcaagaattcaatccaactat

SEQ ID NO: 152 - protein, 1439 aa, Drosophila melanogaster
  AAF56334
  GI:7301203
MPASERYRTHDGTCNNKRRPRWGAAQMPFNRFLPPEYGDGVDTVRSSADGSTLSSSRFVSLLVHGAREGEAPLTLMIAQWGQMLDHDMTSTAQPRSINGSIPSCCGGKDFHPACFPIKVPLDDPWLAPLKVRCLEFLRSAPAQRRDCVLSWREQTNQVTSYIDASPIYSNSAKSSDNARVFRHGLLVYGRGDPAEDVCQRGAIATKCIRSGDGRSGEQPGLLAMHHVWVGEHNRIAMELSELNPHWSDEKVYQETRRIVGAMFQHITFREFLPVILGREVVKLFDLELMPSGYYERYSSKVNPTVANAFAAAAFRFGHSLVQNSYTRCDRHHNVINNNVSLHEEFQRGDIGSAGSLHRLLRGLASQRALKRDEFITPELTNHLFQTPGFPFGLDLAAINIQRGRDHGIAPYSAWRVPCGLSPILSWDDFANVVGPESAKRIGHAYRSVHDIDLFVGGIAERPVVGGLVGPTFACIIAQQFSNSRRGDRFWYENGGFESSFTPAQLHSLRRVSLAQVLCRTVGGGTLQPHIFIPAEFEDNERQTCGVGSLSPIDLSPWLEQDPFHNQQVPEQVFTIGQPELGSVQIIKEDKAGFSNRVKPIKPQVEVSPSSLSGFHRPTNENLTKVSDKLDLRRKTVTKKNNTNNRQQTTRKPVGGVNNKLDKSPKITLNIKSVNVRRPEGSGLKRRVIINNVPVELRSSGGNATAEETEPGNLTDEDDEFHDDAGEVVDMEDIVEVRASKDDPSKLTKTDLNQNRNDSKTTETEQTEKNTTIEPTEDSTDEPKTERRDARKMEPHPAAKTPDKTADSRLLHNQRNRTTTPRDFQASSTVSLKRFTRQTKAPKVSKPTKRAEELRQYQNRPLYERPQKVVVNGPNADQYEIEINIRQTNKNPASRPSTSDYAQYTTANKPYYNSNYAPHYMDYASTTPIPLPSYGYHQPIGEISNQGVRTKPPTIIYLNDNDDRRTTTRAPNIFQNFLTFATNSFNPLGIRRPMPTTPSPISQSHKEPGQFENNVVHSPISNSHILTGGGPSASYSPRPPSVHSYPVATSSQIGGNPGSGFLHASSSAVSAGHFGSISGVATANGADSTFSFNIRPRPSPDLGSVVSSYPRPVSSQGGGSSYRPDYAPTQSELYYDRELITDRNPSPFSGSSSAQRPHQQTFYGRSPELKEVGNNSNELTHTEHKLYLQDYDYASRTLSNLTTDESHQTDDDTDYVYDEDIASNDLDKTKTRKETDLNELTTKKFDQDGYMRPQLMRDATHNSTGYNVTSLDDNYVMPMLENRTRTNYVTEVPKPMLSTSSRSVTNSKVTVFPDSLGKQLANDILADEATDDYVDANGHTEARLKAQKLKQLASVAFAPITVLTKPDRPDNWVIYNKASEEPPLPQPPAVNMDVAPSGEVPTPIKNFNNAWLKQDLKARPETPPTRLAEEVTTVAAADSI

SEQ ID NO: 153 - DNA, 2602 bp, Drosophila melanogaster
  Name: CG11594
  AE003480
  GI: 10727290
  Transcript: CT34844
ctcgttgcgactggttgtgcgacaggtgtcggaataaataaaagcaaaaacattcgacggcttttgtttgcgctgataaacaacctgcgcatatgtacaagcaaagcaaaatactgctcgaataattgtttgttcaaaacaatcaggtgtgccttttataaaactaaaagtttctaatttctaaacgagtaggtgtgcgcgcttctaataaaaaatttcggtattaaaaattaagttgttttaaaattaaatgctcttcagctttttaagatgcagcagaactattgtgctaaagaaaataaacaagcacaaatcacaaattacggtaaatgcaaaaatataaacaaaaacgtgcctgaaagatacggggttactgcgatcgtggtttaaataaaatcaaaagatacaaaaccatagcgatacaatacagatgcagatacatgtgcgtctgtggagtttggaaaatcaaaaattataccaaaaataaaccataattgatataaaaaaagcttatcatcatttttctatatttattgcctctgacaattgtcgataacaattaagaatataaatatctcacttcttctgtggcaaattaagatatttcataactgtaactcaattataagtaatcaaatgagatctttagaaaccggtacttgggttaatttacacagtttctagctgtacagggtctctaggcgttcgcatatcaggttgcttatcagttcgcgtccgacgctcgacgacttcgcttcgcttttggtctgggattgggtttgggttttcgcatcgagccaataacatttatttgaccgccaaggtgattagaggcgtctgtgacggagacggcgacttggaaatgtcatccggaccgttttttgtgggcgtggacgtgggcacgggcagtgcgagggcggccctggtcgcctgcgatgggcgtgtcctggagcaggcggtgcagacgatccaaacgtggaatcctgagccgggctactacaaccagtcatccgataatatatggcagtccatctgccaggtggtgaagaaagtcattggcggcgtcgataagtcaaaagtcaagggcattggcttcgatgccacctgctccttggtggttctgggcccccagggatcgccgctgacggtgagcaagtccggtgaggcggagcagaacataatcctctggatggaccatcgtgccgagcaggaaacccaagagatcaatgccttcaagcactcgctgctgaaatatgtgggtggtcaggtttcgctggaaatggaggttcccaaattgctgtggctgaagaggaatctgtcacagacttttggaaatatttggagggtctttgacctgcccgactttctgacctggcgagccactggagtggacacccgatcactttgctcggtggtgtgcaagtggaactacgatgcagcgaatggcagttggaacaaggagttcctgaagcaggcggacttggaggagttgacacagaataacttcgagaaattgggcagtgatgtccagccgcctggccgaacggtgggcaaaggactcacggccaaggctgctggggaactgggcttatccgccggcactgtggtgagcacctccctaatcgatgcccatgctggcgccttgggaatgtttggatgccgctcaaaggagtccaagggtgccgacgatgtccagggtaaaatggctctgattgccggtacatccacctgccacatgagcatcacccggaaggcatgcttcgcacaaggtgtttggggtccctatcaggatgccattattcccggctacttcctaaacgagggtggtcagagcatcgcaggacatctcctagatcacgtcctcaagtcgcatgaatcctacgccgaactgaaatcccaattgggagaggataagtttatctaccagcatcttaataagttgctgccggaactggcagcagctcgaggattaagccaggtgggctgtctcacccaggatgtccatgtctggccggacttgcatggcaatcggtcgcccatcgcagatcccacgctgcgaggagtgattactggactggacatgacgcgaggaactgaatctctggccatcaaatacttggcgttcgtccaagctctggcttacggcacacgtcacattattgaaaacctttaccagtacggtagagctccctttcaaacgctacttttctgcgggggattggccaagaatcctctgtacgtacaatgtcatgcggacatttgcaatctgcccgcactgattccggatgaacaggaaatggttctggtgggcgctgctgccttgggagccgctgcctccggccacttcgacagcttggagagcgcctcgaaatccatgggtggcactggccagctggtgaagccgaacgcggaaacgcttgagttccacaatcgcaagtacaaggtgttcctgcagctgctggagaaccaacgacagtacaggcgcattatgcaggcagacacaaagtgattttttttcattccgatgtcaagactttcaataattttaaataaatgccgtacatgagcattgtaacaaataaaaagtttggcgcacacaggt

SEQ ID NO: 154 - protein, 548 aa, Drosophila melanogaster
  AAF47823
  GI:7292419
MSSGPFFVGVDVGTGSARAALVACDGRVLEQAVQTIQTWNPEPGYYNQSSDNIWQSICQVVKKVIGGVDKSKVKGIGFDATCSLVVLGPQGSPLTVSKSGEAEQNIILWMDHRAEQETQEINAFKHSLLKYVGGQVSLEMEVPKLLWLKRNLSQTFGNIWRVFDLPDFLTWRATGVDTRSLCSVVCKWNYDAANGSWNKEFLKQADLEELTQNNFEKLGSDVQPPGRTVGKGLTAKAAGELGLSAGTVVSTSLIDAHAGALGMFGCRSKESKGADDVQGKMALIAGTSTCHMSITRKACFAQGVWGPYQDAIIPGYFLNEGGQSIAGHLLDHVLKSHESYAELKSQLGEDKFIYQHLNKLLPELAAARGLSQVGCLTQDVHVWPDLHGNRSPIADPTLRGVITGLDMTRGTESLAIKYLAFVQALAYGTRHIIENLYQYGRAPFQTLLFCGGLAKNPLYVQCHADICNLPALIPDEQEMVLVGAAALGAAASGHFDSLESASKSMGGTGQLVKPNAETLEFHNRKYKVFLQLLENQRQYRRIMQADTK

SEQ ID NO: 155 - DNA, 3303 bp, Drosophila melanogaster
  Name:S6kll
  AE003574
  GI: 10803726
  Transcript: CT34367
aagcaacacagctgtgcggattgcgaagcggatagtaaagcagacggcgtacgaaacgtgggcgcattaggaaagcgctgcttgttggccgtaggagcagcagggaaaccagagaaatccggagaggcaacagcgcagtcgactgcgacgcccacgcagcggaagtaataaaaaagaaaagtgaaatcggaagtagggagagttcggtggaggaggagcagcaggaggagttggaaacgcagggggaactcgggctctagcattgtgcatcaggatctggaaacaaaggaaccgctaggagcagttgcctcacaacgctagcagccaccgaagtcatgccgctggccgattcgcaaaaggatctccgccagcagcctcagcagcagcagcagcagcagcatgtgtcctccaccagcagcagcaacaatgcggagcagcaatgcagcagcagcggattgggtctgcagctgcgccagcgcatgcaaattacctcgtccggctgcagcagcctggcggtcacgcccatggagcacacgcccaccgaggacgatgagagtggcggaggcaacagcggtgtcacttcctcggtgaccactgtgacatcatcgcaacgccgccagcagctgcaacaggtgcaacagcaatctgctctgcaagcggccctcgagcagcatcacatctcaccaacagcagacttggattccgctaggaaaaggccgacgcatcgaaccttgtgcccgccgccagaacttatggagctgagtgattccgagtcccagggaggcgtggaaactggcggtaggagagaaggggctactgggcgaagtgcacctgatttagaagacaccgagcccctatatgaaacagaaaacgaattcgagcttaaggaagtcatcaaggagggtcacgacaaggccgatccttcccagttcgagctcctacgggttctgggcgaaggtagctttggaaaggtgtttctagtgcgaaagatcataggcaaagatgcaggaacactctatgccatgaaggtgctcaaaaaggccaccctaaaagtaaaagatcgcgtaaggagcacaaatgaacgaaaaatactagcggacgtgggtcatgctttcatcgtacgtcttcactatgccttccaaactcccggaaaactctacttgatactggattttcttcgtggcggtgatctgtttacccgtctatccaaagaagtaatgtttacggaagaagatgtcaagttctatttagcggaactggcgctagctatgaatcacctacacacattgggcattatctacagggatctgaaaccggaaaatattctactggacgagcatggccatatagccttgacggactttggtctatccaagcagcctttggatggctcaaaaacatatagcttttgtggaaccgtagaatacatggcgccggagatcgtgaaccgaaagggacacgattttgccgctgattggtggagtttcggggtgctcatgtacgaaatgttaacggggaatttaccctttcatggccaaacccgccaagagactatgaatcagatccttagaagtaagctgggcatgccggagaatttgtcgccagaggcgcaatccctgctacgtgctctcttcaaaagaaacccccagaatcgtttgggtgcgggtgcccaaggaattctggacatcaaggcgcactgcttttttgccaccatcgactgggtgagattagaacgaaagcaggtgcgtccgcctttcataccggcggttagccgtgacgatgccttttactttgatgtggagtacacctcaaagtcccccagggattctccgggtggcccgatctccgcatctgcccatgagatcttccgcgggttcagctttgtggctcctgtccttctggaaggtcagtgtgctggctcgaatatgtgctccaccagcgccagtcctctgcatagtatagctcctattcctgctgctccagtgggagcccctcgaacattacctggtgttcttcccggaaacttccatgcggaatataatctactgcaagaactgggacgtggaaccttttcagtttgtcggttgtgcgagcatcgagcctccaagaaacattacgcagtaaaagtaatcgaaaaggcagctgtggccgcagcatccacatccacttctgccgattgttgggaggaggtggagattatgctgaggtacggcaaccacccaaatatcgtcactctgtactctgtttacgaggatgcggggtccgcatatcttgtgatggagctgcttaagggtggcgagcttctcgatcggatacttgccgtgggccagatgtgcgagagtgaggccagcgcggtgttaaggacaattgcatctgcggtagcatatctccatgaacatggcgtggtccatcgagatcttaagccttcaaatatgatatatgccagtatgcggcaaactcccgagaccctaaagctctgcgatttgggtttcgcgaagcagctgcgcgcggacaacggcctcctgatgacgccatgctacacagccaattttgtggctcccgaggttctaaagagacagggctatgacctggcttgcgacatctggtcgctcggtgtgctgctttacatcatgttatccggccggacgcctttcgccagcactccaaatgattcaccggacgtaatactgaagcgcatcggatcaggacaaattgacttcacaagcagtcgctgggcactgatcagtgtgccggccaaagaacttttgcgtcagatgctacacatagtaccggagaatcggccgacggcggcgcgaatacttgagcacgactggctgcgggagcaattcgccggcggcgtacagcttacagagtatgcggtggcgcccggatcccaactttcgctgggcgcccagcagcagcagcagaatcacatctccatggccttaagaggcgctgttgatgccactttccgggctattgccataccccaggcggcgaatgtgggacccgtagaactttccatgctcgccaagaggcgggccaaagatcgagccaacctgcactcctaatcctgggcggctgcatggtgtccgcggcgccaggccaagcggcagatagtccgactacttttccgaatctatagtattctaatccaatgctgctgtgccaatccgcgtcgtcttgtcaaggacaatgcgcagaagcttggttcacatccacaaacgctgggcaatcctcgccaacgctgccgcagcgccaagctgcgtgtggtttaggttttgggggaatcggcctaaccta

SEQ ID NO: 156 - protein, 911 aa, Drosophila melanogaster
  AAF50945
  GI:7295638
MPLADSQKDLRQQPQQQQQQQHVSSTSSSNNAEQQCSSSGLGLQLRQRMQITSSGCSSLAVTPMEHTPTEDDESGGGNSGVTSSVTTVTSSQRRQQLQQVQQQSALQAALEQHHISPTADLDSARKRPTHRTLCPPPELMELSDSESQGGVETGGRREGATGRSAPDLEDTEPLYETENEFELKEVIKEGHDKADPSQFELLRVLGEGSFGKVFLVRKIIGKDAGTLYAMKVLKKATLKVKDRVRSTNERKILADVGHAFIVRLHYAFQTPGKLYLILDFLRGGDLFTRLSKEVMFTEEDVKFYLAELALAMNHLHTLGIIYRDLKPENILLDEHGHIALTDFGLSKQPLDGSKTYSFCGTVEYMAPEIVNRKGHDFAADWWSFGVLMYEMLTGNLPFHGQTRQETMNQILRSKLGMPENLSPEAQSLLRALFKRNPQNRLGAGAQGILDIKAHCFFATIDWVRLERKQVRPPFIPAVSRDDAFYFDVEYTSKSPRDSPGGPISASAHEIFRGFSFVAPVLLEGQCAGSNMCSTSASPLHSIAPIPAAPVGAPRTLPGVLPGNFHAEYNLLQELGRGTFSVCRLCEHRASKKHYAVKVIEKAAVAAASTSTSADCWEEVEIMLRYGNHPNIVTLYSVYEDAGSAYLVMELLKGGELLDRILAVGQMCESEASAVLRTIASAVAYLHEHGVVHRDLKPSNMIYASMRQTPETLKLCDLGFAKQLRADNGLLMTPCYTANFVAPEVLKRQGYDLACDIWSLGVLLYIMLSGRTPFASTPNDSPDVILKRIGSGQIDFTSSRWALISVPAKELLRQMLHIVPENRPTAARILEHDWLREQFAGGVQLTEYAVAPGSQLSLGAQQQQQNHISMALRGAVDATFRAIAIPQAANVGPVELSMLAKRRAKDRANLHS

SEQ ID NO: 157 - DNA, 1238 bp, Drosophila melanogaster
  Name: CG11714
  AE003544
  GI: 10727982
  Transcript: CT36751
atttcgacacttctacagaaagactttcctatcagctaaattttctgttcgaaatcgtcgggaaaaactggatcgccttgcgtaagatgagtatctggcccattcgaacactaccaaattccaaaatgcgtagttgcatgatggagctcggtcgcaccaatcgccacacggattgcacatttataattgaggatgagagcggtggcagtcaatcgtttccctgccacaaattgctattcagctgcgcctccgatgtgttcgatcgcatgctctatggcgactacattgagtctactagcggagttgtcagactaaatgatgtacaaccggatatatttgagaaattccgagactatgtctacggctatgagtgcgataaactgcagaagtacgactttgatactctgattcgcctctgtgagtttgctaacaaatatctggtgcaatctctcgaagaggactgtgtaaaggatttgctgatacgcaagaacacttttgacatgggagagttacttcgtctattccagtgtgcgcatcgcatgaatcgcaagtcgttaataaatcagatagcctgggagctaaagtgcaccttcaagagcaccttggaccactctggcgtatacgaattcaattgcgaggtatttaaacactatatcgaagtgattgctagcaaaatatcggaggcagatcgtttccgtctgctggaaatgtatctaaaatataatggtatcgaggaattggaaagcgcggggcaagtggatagccaggatgcaactgaagccaacaccaccaccatcaccaccaccaacgaagtggaaaatcaagaatcggaacttccgtccactagctgcgttccgctcaaaactgaatgcagttttgccgttccaaataagaaggcaagttttgtcagcgatctacttgcactgattgattttggcaaactttcgcccaaggaattctacgatggacccggcaaatccaatttccttagcctggctgagaagtacgagcatatgtatcaaatcgccaagaactgcgttacggccaaagatgaactgcagctgaagatggcattgaccacggaacagaagccccccctaccttccgaatcccgacgcatagttcatatgggaggaagcttaatgcgcgacgaaccaacggcttcttcggttacctcgcattacctttcccgacccatccgtcgatatcgcgcctggtcagcacacagtgacgtctaa

SEQ ID NO: 158 - protein, 383 aa, Drosophila melanogaster
  AAF50053
  GI:7294716
MSIWPIRTLPNSKMRSCMMELGRTNRHTDCTFIIEDESGGSQSFPCHKLLFSCASDVFDRMLYGDYIESTSGVVRLNDVQPDIFEKFRDYVYGYECDKLQKYDFDTLIRLCEFANKYLVQSLEEDCVKDLLIRKNTFDMGELLRLFQCAHRMNRKSLINQIAWELKCTFKSTLDHSGVYEFNCEVFKHYIEVIASKISEADRFRLLEMYLKYNGIEELESAGQVDSQDATEANTTTITTTNEVENQESELPSTSCVPLKTECSFAVPNKKASFVSDLLALIDFGKLSPKEFYDGPGKSNFLSLAEKYEHMYQIAKNCVTAKDELQLKMALTTEQKPPLPSESRRIVHMGGSLMRDEPTASSVTSHYLSRPIRRYRAWSAHSDV

SEQ ID NO: 159 - DNA, 1852 bp, Drosophila melanogaster
  Name: CG3534
  AE003715
  GI: 7300193
  Transcript: CT11741
cggaagcagtttgaacatgggtccgccaaagcagctgaaacgaacctttcttggcttcgacttgagcacgcaaaagctcaaagccgtcctgctgggctccagtttggaggtggttgccgcggctgaagtgaaattcgacaccgacttgccggagttccggaccaccggtggagccaacgctggatccatcaaaaatgaatactttgtacaaccagtgatgtgggtgaaggccatggacattgtcctggaccgactggttatgcagcaagcggatcttagcaccgtagctgccatcagtggctccggacagcagcacggatcgctctactggtccaaacatggaatcaacacgctgcaaaacctcgattccgagaagttccttcacgcacaaatcgacgactccgcctttgtggtaaatcgtactccgatttggatggacgccaccaccaccaaacagtgcctagagatggagatggctgttggtggcaaacttaacatggtggaactgacgggctcgaagtgctacgaacgttttacgggtccccaaattagaaagatatatcagcaacgctgccacgcctacgaagaggccaaccgaatctcattggtcagcagttttatatcatcgctatttctgggctccgtcgctccaattgacttcagtgatggttccggcatgaatctgctggacatccgcaagaagaactggtccaaagaatgcctaaatgtttgtgcacccgatttggacaagcgcctggacattccggtcagtccaaattcgattttaggcaacgtctctccgtactttgtggagcgctttagtttttcgcccgattgcaaagtggctgctagcacgggggacaatccttcggcgctgtctggaatgttggtgggcagcagctggcttaccatttccatgggcacaagtgacaccctaatgatgagcttgaaggagccgctaaactgggaggagggtcatatactctgccatccaactgaaacggaagaattcatgggccttctatgttttagaaatgcttcattggtccgtgaggaaatgaacaagaagacaaccggcggcgattgggataaattcaatgagtatctcgactccacgccccgtggaaactttgggaacatggccgtgcactttaacgacatggaaatcattcccaaggcgcagggtattctgcgatggaacagggaaatggatcccagttccccggacgcggctaggggtgtaatcaaattcagctcgccccaaatcgaaattcgagccctagttgaaggtcagatgctgcatcaccgggctgtggctgaagaccttggctacaaattcggacccgagacacaaatccttgtcacaggaggcgcatctgttaacaaatcaatcctgcaaacaattgccgatgtgttcaatgctcccgtccatatccaggatgaaggatttgaggctgccctactgggagccgcttatcgatccgcctacgctctgtaccttcaagaggcaggtgatggggtgacgcctctctgttaccgagattatatcctaagtctgacaagtaacaaactgagccttgtatgcgaaccacacaaggacagcgaggaaatctacgctccaatgctacaacgatatcgcgaaatggcgcgcgtcctgtccaatcctaacacataaactctccgaaagcccaacgtaacattccagtttatactccgtacattcacaaactgattccttcttaaacgtctcctgtaattgacagaacttaagtgcaattaacaaattctgtgattgacgatttattacaaatttatgcgaaaccatatacaaataaatttttatatatggccc

SEQ ID NO: 160 - protein, 552 aa, Drosophila melanogaster
  AAF55371
  GI:7300206
MGPPKQLKRTFLGFDLSTQKLKAVLLGSSLEVVAAAEVKFDTDLPEFRTTGGANAGSIKNEYFVQPVMWVKAMDIVLDRLVMQQADLSTVAAISGSGQQHGSLYWSKHGINTLQNLDSEKFLHAQIDDSAFVVNRTPIWMDATTTKQCLEMEMAVGGKLNMVELTGSKCYERFTGPQIRKIYQQRCHAYEEANRISLVSSFISSLFLGSVAPIDFSDGSGMNLLDIRKKNWSKECLNVCAPDLDKRLDIPVSPNSILGNVSPYFVERFSFSPDCKVAASTGDNPSALSGMLVGSSWLTISMGTSDTLMMSLKEPLNWEEGHILCHPTETEEFMGLLCFRNASLVREEMNKKTTGGDWDKFNEYLDSTPRGNFGNMAVHFNDMEIIPKAQGILRWNREMDPSSPDAARGVIKFSSPQIEIRALVEGQMLHHRAVAEDLGYKFGPETQILVTGGASVNKSILQTIADVFNAPVHIQDEGFEAALLGAAYRSAYALYLQEAGDGVTPLCYRDYILSLTSNKLSLVCEPHKDSEEIYAPMLQRYREMARVLSNPNT

SEQ ID NO: 161 - DNA, 1119 bp, Drosophila melanogaster
  Name: CG7335
  AE003514
  GI: 10727803
  Transcript: CT22623
atgaaaaagcaaatcgtaagggagttcataaccgtaaagaaggtacttcacctgccgccggagccacccccaccgccgccacctcctaagcgccacgttctggctgtgggcagctgcaccctggacatgatcaccatcgtggatctgcctctttttccaggccaggtgcaacgcaccacggagggaagctggcggcgcggcggtcccgctgccaatatatgcactgtgtggcggcgactgggcttggagtgcgaattcctcggagttttgagcagggttagggcgttcgagagcctgttgaatggatttcaatcgcagggaatcgacatttcgcattgcccgctgacgaatcaccggcctgcgcaccgcagcatcattgtccaacgtaacgtggatacgcgaaccatgctcgagttcgccaatgccaaccaggagctcacctaccagcagtttgtgggcgccgtggactaccagaagtactcgtggatacacttcgaatgtcgtaatcccgttgagatgctgcgcatggtcctggcggtcatacaattcaacgagcgctgccccgagtcaaggatcacactctctgtggatctggacaacttgcgaccggccaccatgttgatggccagtatggtggactacgtcttcgcccgaaagaccatgatgcgtacgtactgttttatgaatggacgcgaggttgtttgggcgattaggaatgaaatgcgaagagcacggactcaatgggaaaaaagccagcccaaaaagatgccctatctacctcctgatcccccagatgagcattccaacggatattgcccgggaccgctgaataaccaacccgtcgtcatatacaataattatatggaaggcgccagttgcctgatggccgacgacacctacttcaaggtgggctcccagattccgcccaaattagtggacgttgtggccgttaacgacaccttctcggcggccgtgatatatgcactgattaaggtcaagatgcggctgagggatgccatcgagtacggaacccgggcgtcgtctctgaagttgacgggaaacggattcgatgtgctgcggtgtatgcccaaagatctgattggttgttactatacttaa

SEQ ID NO: 162 - protein, 372 aa, Drosophila melanogaster
  AAF49067
  GI:7293697
MKKQIVREFITVKKVLHLPPEPPPPPPPPKRHVLAVGSCTLDMITIVDLPLFPGQVQRTTEGSWRRGGPAANICTVWRRLGLECEFLGVLSRVRAFESLLNGFQSQGIDISHCPLTNHRPAHRSIIVQRNVDTRTMLEFANANQELTYQQFVGAVDYQKYSWIHFECRNPVEMLRMVLAVIQFNERCPESRITLSVDLDNLRPATMLMASMVDYVFARKTMMRTYCFMNGREVVWAIRNEMRRARTQWEKSQPKKMPYLPPDPPDEHSNGYCPGPLNNQPVVIYNNYMEGASCLMADDTYFKVGSQIPPKLVDVVAVNDTFSAAVIYALIKVKMRLRDAIEYGTRASSLKLTGNGFDVLRCMPKDLIGCYYT

SEQ ID NO: 163 - DNA, 1533 bp, Drosophila melanogaster
  Name: CG11275
  AE003456
  GI: 7291355
  Transcript: CT31473
ttgcgctcgacggttgtcgctattctggttctcgctcaagttatccgaactcttggaacagctgggtagtctggtctggcctggcgcataaagacgcgatatcggtcaagttcagacgaagaagacgacgacgcggcgatcactcaattagcctcaccgtgagggcgcgtgaaattcacttttaaatttcccccaactcgattttcacatacacaaattgcttttgttacgattctcgcgtgtgcttggttgaaaaggaatttgtcacagtgccaaaagatgagcatctcggcggtggatcgcaaagagccgggcagtgtgagcagcggtctgggtaggcgatacgggcagctgctccgtggagccaagtacacagattgcgtgttccacgtgtgcgaggagcaagtgaaatgccacaagctcatcctgagctccgccagtcccgttttcgaggcaatgttctttggtcccatgcaaaacaacgagcccgagccggaaatcgaaatccacgacataagctctgccatcttcaaggtgctggtggagtacatctacacgggcgtcgttgactacaatggcctggagctggtggcctgcattgagctgtactacgccgctgagaagtatctgctggaggagctgatcgccgacacgctgatggttatcacccgcaagctgcgatttgccaatatcttgcccgctctagagctaagtgtttgcatgggcctcgacgggttgctggaggtctgcatgacctttttcatgcgatgctgtgttaataatggacagtatatgagccaccttaaggagcactatgtgcacgtgtccaaggagtgtgtgaaggccataatagcggcgtgcaaggaaccgcacaagttactcatctggtatgtttatgagtggacacgacaggagtgcgagcagttgggtctgggtcccagcgatgccgacttagtagtgcacgacttgggtggcaaaacaagcgactggcctgcggcttcgggtgctagtgatttggaatcacctgccctaactccggtggttttggtggagcgctgctattacaaggcctgcaggccctttacagtggatgcagaaactccgctgtttcgcttgcgtctaaagtgctctagatttatctccttgatgggcttggtcctgaacagcaggctgactcccaacctattgggtcacgtccagcagctggagtaccgcgaatcgctgcggctggacctttgcgaggtgcccgctgaaagcgagggtccggccacgtcgcccgtatggagtcacgttgtccagagccagaataccaagtacaactgcaacctgcatcttggctggcgacgcgaagaggcctgtgtgctgaatccggagctgacctatgagctgcagatccgctgggacagcagtgcttacggcgccgagtatccgtgcagcctgcagtcctgccaggcggacggaattcggttcactgacgaggacagcttcagcggaagtctcgtcaagggactgcgctatgccaacctggtgtag

SEQ ID NO: 164 - protein, 417 aa, Drosophila melanogaster
  AAF46814
  GI:7291386
MSISAVDRKEPGSVSSGLGRRYGQLLRGAKYTDCVFHVCEEQVKCHKLILSSASPVFEAMFFGPMQNNEPEPEIEIHDISSAIFKVLVEYIYTGVVDYNGLELVACIELYYAAEKYLLEELIADTLMVITRKLRFANILPALELSVCMGLDGLLEVCMTFFMRCCVNNGQYMSHLKEHYVHVSKECVKAIIAACKEPHKLLIWYVYEWTRQECEQLGLGPSDADLVVHDLGGKTSDWPAASGASDLESPALTPVVLVERCYYKACRPFTVDAETPLFRLRLKCSRFISLMGLVLNSRLTPNLLGHVQQLEYRESLRLDLCEVPAESEGPATSPVWSHVVQSQNTKYNCNLHLGWRREEACVLNPELTYELQIRWDSSAYGAEYPCSLQSCQADGIRFTDEDSFSGSLVKGLRYANLV

SEQ ID NO: 165 - DNA, 750 bp, Drosophila melanogaster
  Name: CG16726
  AE003551
  GI: 10728019
  Transcript: CT37213
atggatatggagtatataactagcagtagtggcaacataactgccactacagaagcagatttcagttcatctttgggcgaatccaatgtcacggaatacaatacaacggaaatggacgcgaatgaatcagctggcgaggatgaggagatgctaaggatagccttttttatagggcacttcgtgcatcaatactatataccagtgctttgctgcacgggcagcattggcaatatcctctccgtgtttgtcttctttaggaccaagttgagaaagttgtcctccagcttttacctggccgctctcgcagtgagcgacacctgcttcctggccggactcttcgcacagtggctgaacttcctcaatgtggatatctataatcaaaactacttttgccagttcttcacgttcttcagctacctggccagcttctgctccgtctggtttgtggtggccttcaccgtggagcgcttcattgccgtcatctatccactgaagcgccagaccatgtgcaccgtgcgccgggccaagatcgtcctgttttgtttgacactcgtgggatgtctgcactgtctgccctatatagtcattgccaagccggtgtttatgcccaaattgaacacgaccatttgcgatctcaactcggaatacaaattccctgaatttttcatttgggttgccactagcaaccagcggcacaacggaaatttatctaccatttcccgcaccaatatttggctttaccaaaggtaa

SEQ ID NO: 166 - protein, 249 aa, Drosophila melanogaster
  AAF50229
  GI:7294899
MDMEYITSSSGNITATTEADFSSSLGESNVTEYNTTEMDANESAGEDEEMLRIAFFIGHFVHQYYIPVLCCTGSIGNILSVFVFFRTKLRKLSSSFYLAALAVSDTCFLAGLFAQWLNFLNVDIYNQNYFCQFFTFFSYLASFCSVWFVVAFTVERFIAVIYPLKRQTMCTVRRAKIVLFCLTLVGCLHCLPYIVIAKPVFMPKLNTTICDLNSEYKFPEFFIWVATSNQRHNGNLSTISRTNIWLYQR

SEQ ID NO: 167 - DNA, 906 bp, Drosophila melanogaster
  Name: CG7514
  AE003482
  GI: 10727313
  Transcript: CT2166
atggcgtacagcatcgaaaagaaatccatacccggctacatgatgtacattaatggcggtctggccggaatgctgggcacctgcattgtgcagccattggatttggtgaagaccagaatgcagatatcagccacgacgggcgagtacaagagctccttcgattgcctgctaaaggtttttaaaaacgagggcatacttgcgttgtataatggattgagtgcgggattgatgcgacaggctacgtacacgacagcccgaatgggtttctaccaaatggagatcgacgcctatcgcaagcagttcaatgcaccgcccactgtgttggccagcatgggtatgggcattctggccggtgctttcggtgccatgttcggcaatccggcggaggtggccctcatccggatgatgtccgataaccgattgccaccagcggagaggcgaaactacacgggtgtgttgaacgcctttgtgcggatcgtcaaggatgagggtgttatcaccctctggaaaggatgcatgcccactgtgggtcgggccatgatcgtcaacatggttcagctggcctcgtactcgcagttaaaggcagcattttcggaatacttttcgggactttcgcttcacatcgctgccgccatgatgtccggtctattgaccaccattgcctcaatgccactggacatggccaaaacgcgcatccagcagcaaaagacggccgagtacaagggcaccatggatgtcctgatgaaggtctcaaagaatgagggtatcgcctccctgtggaagggcttcacgccctatttgtgtcgcttaggaccgcacacggtgtttgcctttatattcctggaacaactcaccaaggcctacaagcacattgtgctcggcgacgattctgaatcgaacatctaa

SEQ ID NO: 168 - protein, 301 aa, Drosophila melanogaster
  AAF47931
  GI:7292529
MAYSIEKKSIPGYMMYINGGLAGMLGTCIVQPLDLVKTRMQISATTGEYKSSFDCLLKVFKNEGILALYNGLSAGLMRQATYTTARMGFYQMEIDAYRKQFNAPPTVLASMGMGILAGAFGAMFGNPAEVALIRMMSDNRLPPAERRNYTGVLNAFVRIVKDEGVITLWKGCMPTVGRAMIVNMVQLASYSQLKAAFSEYFSGLSLHIAAAMMSGLLTTIASMPLDMAKTRIQQQKTAEYKGTMDVLMKVSKNEGIASLWKGFTPYLCRLGPHTVFAFIFLEQLTKAYKHIVLGDDSESNI

SEQ ID NO: 169 - DNA, 1398 bp, Drosophila melanogaster
  Name: CG17283
  AE003717
  GI: 7300241
  Transcript: CT38253
atgcggtgcaggatcttggtgctgtgtgcattcatatgcctccttgtaattttgaccgaggccaggcagaggaaagttaaccattccgctgatagaagatcattggcagtcagaagtggacacaggaatgagcggagtagtgctcttcatggaagaggattggctgcacgatcaaggaatcaaaggaaacgcagattaaatgctgccaagagaagcaggaggaagcgtaacttggctagaaagtcaaatcggaaaattagggccaagaccgagtcaatcgttagaagtgattctagttacgctactttaccattggacttccaacagaacttcgtgcgaaccaccgacaacctgcgatcggagaaggcctttttggccaatcgatatggctttagttttgccaaaagttctggaacggctactttgaaaaacacggcgaacatggagtatacctgcaaaatgaacattggtacacccaagcagaagttcacagttcttccggacaccggaagttcgaatatttgggtgccaggaccgcattgcaagagtaaggcctgcaagaaacacaaacaatatcatccggccaagtcaagtacctatgttaagaatgggaaatcctttgccatcacctacggttcgggtagtgtggcaggagttctggccaaggatacggtgagaatagctgggctggttgtgaccaatcaaactttcgccatgaccaccaaggaaccgggaaccactttcgtgacctcaaatttcgatggtatactagggctgggatatcgatccatagcggtggacaatgtgaagaccctggtgcagaatatgtgctcggaggatgtgatcaccagttgcaagtttgccatttgcatgaagggcggcggcagttcctctcgaggtggtgcaataatcttcggcagctccaatacaagtgcttatagcggatccaatagctacacatacactccggtgaccaaaaagggttactggcagttcactctgcaggacatttacgtgggcggcaccaaagtgagcggctcggtgcaggccattgtggattccggaacttcattgatcacagctccgacggccatctacaacaagatcaacaaggtcatcggatgcagggctacctccagcggagagtgttggatgaagtgcgccaagaaaatacccgacttcacctttgtcatcgcgggcaagaagttcgtcgtcaagggtaacaaaatgaaattaaaggtgaggaccaacagaggcaggacagtctgcatatcggcggtaactgaagttcccgacgagccagtgatcctgggcgatgccttcatccggcatttctgcacggaattcgacttggccaacaatcgcattggattcgctgccactacgtattccacttag

SEQ ID NO: 170 - protein, 465 aa, Drosophila melanogaster
  AAF55416
  GI:7300253
MRCRILVLCAFICLLVILTEARQRKVNHSADRRSLAVRSGHRNERSSALHGRGLAARSRNQRKRRLNAAKRSRRKRNLARKSNRKIRAKTESIVRSDSSYATLPLDFQQNFVRTTDNLRSEKAFLANRYGFSFAKSSGTATLKNTANMEYTCKMNIGTPKQKFTVLPDTGSSNIWVPGPHCKSKACKKHKQYHPAKSSTYVKNGKSFAITYGSGSVAGVLAKDTVRIAGLVVTNQTFAMTTKEPGTTFVTSNFDGILGLGYRSIAVDNVKTLVQNMCSEDVITSCKFAICMKGGGSSSRGGAIIFGSSNTSAYSGSNSYTYTPVTKKGYWQFTLQDIYVGGTKVSGSVQAIVDSGTSLITAPTAIYNKINKVIGCRATSSGECWMKCAKKIPDFTFVIAGKKFVVKGNKMKLKVRTNRGRTVCISAVTEVPDEPVILGDAFIRHFCTEFDLANNRIGFAATTYST

SEQ ID NO: 171 - DNA, 8605 bp, Drosophila melanogaster
  Name: BcDNA:GH07626
  AE003581
  GI: 10727365
  Transcript: CT11871
cagcattccgtcgttgtcgtggttttacaagccggtacgctacgtttgaatcccaaagaacataactgtgtgtggcagagtaattttcaaaaactaatagctactaactaagctaataacggcagtcaacggagaacttcgagtcgaaagcagtttcagtttctggattataacggtttccccattcagtcaggaccaactgtaaaggaacaccccccacgaaactgaattcgaatcctccgcgcagccctccgcccgctccactccaagaactcgaaaaacagctgtcgaggaatcgcctgatttctagcccctacaactaaacctgttgcaagccgtggaccagccgcatcctgttgctttcaagcccaacaattgcagcacccatcagccccaacattcacccagcacccagaacaacggaaagagcgctcgcgccaatcgtcgtcgacgccgcagacgcaacaagcagcagcagaattcgcagcaacctgacgccttccgtgataccgacgcgcagctaacaccgagcacctcctcgtccaccccgcactctgcacccaacgatagacaggaccacctaaactcccaattcaatcccgaatccatcaatatgcccgcccgattcgccgaggaagtcatcaccgctgagcccgcacaacgtgccgccccccaattggacctgggtggtggtcactatgtgccccgtcagcagcacctcaacgatgagatcgccatcaccggtttctccggccgtctgccggagagctccaccatcgaggagttcaagcagaatcttttcgacggcgtcgacatggtcaacgatgatccccgccgttgggagcgtggtctgtatggacttcccgacaggattggcaagctcaaggatagcgatctggagaactttgaccaacagttcttcggtgtgcaccaaaagcaggctgagtgcatggacccactgctgcgcatgctgctcgagctcacccatgaagctattattgacgctggcctaaacccaagtgatctgcgcggttcccgcactggtgtgtacatcggtgtgtccaactcggagactgagcagcactggtgcagcgatgctgaccgggttaacggctacggcttgacaggatgtgcccgtgccatgtttgccaaccgcatctccttcacctttgatttcaagggacccagctacagcattgacaccgcttgctccagttctctgtacgccttggaacaggctttctccgatatgcgcgaaggaaaggtcgacaacgccctggtcgctggagctggactgatcctcaagcccaccatgtcgctgcagttcaagcgactgaatatgttgagcccggacggcagctgcaaggccttcgatgagtctggcaatggatacgtccgttccgatggatgtgtggtgctgctcctgcagcgcacctctgcagccaggcgtgtgtatgcctccatcctcaatgtgcgcaccaatacggatggtttcaaggagcagggcatcacataccctattggcaagatgcaaaatcgcctgatccgcgagacctacgaggagattggtcttaaccccgccgatgtggtttacgtggaggcacacggtaccggaaccaaggtgggcgatccccaggaggtgaactctatcactgacttcttctgcaaggaccgtacgacccctctgttgatcggatcggtcaagtccaacatgggtcactcggaacccgcttccggtgtctgctctgtggccaagattctgatcgccatggaggagggcgtcattcccggtaacttgcactacaacaagccgaacccagatctttatggactcgttgatggacgtctcaaggtggtcgacaggaatctgccttggaacggtggcatcatcggcctgaactcctttggttttggaggagccaacgctcacgttatcttaaagtcgaaccccaagcccaaggctttgacccccaaggatggagcactgaaagtggtcctcgcctctggacgcacctttgaggctgtggagcagttgctcgagtccgcctctactaatgccgatgatgatgagtacctgcaactgatcaacgagatccactcaaaggctattccgaatcacttcttccgtggctacggagtggtgagcagcaagggcacccaccaacgtgaggtgatcgagtccaacgacgataaacgccctatttggtacatctactccggcatgggcagccagtgggctagcatggccaaggatctgatgaagatcgaggccttcgccaagaccattcagaggtgtgccgatgtcctaaagcccgagggagtggatctaatcgatgtcctgacccgttccacggacaagagcttcgaaaacattctgaactctttcatctcgattgctgccatgcaagtggctcttaccgatttgctcagctcgctgggcatccaccccgacggaattgtgggacactcggtgggagagcttggatgcgcctacgccgatggctgcttcaccccggagcagaccgtgctggctgcttactggcgaggaaagagcattctggacactcaactggccaagggcaagatggccgctgtgggattgagctgggaagatgcgcacagccgtgtgcccagcgattgcttcccggtgtgccacaacagcgaggacaactgcaccatctctggcccggaggcttccatcgaggctctggtcgctaaactgaacgcggagggagtgttcgccaaggcagtgaactcatccggctacgctttccacagcaagtacatcgctgaagctggacccaaactacgcaagagtctggagaagatcattcccaacgctaagaaccgtaccgcccgctggatcagtaccagcatcccagaatccgcttggaacacaccggtggccaagcaatcctcggccgcctaccacgtgaacaatctgctgtcgccagtgctcttccacgaggcccttcagcacgttcccaagaacgccatttccgtggagattgctccccacggcctgctccaggctatcctcaagcgcgccctgggtcctgatgccaccaatctgagcttggtgaagcgcggacacgagaacaacgttgagttcttcctcaccaatgtgggcaaactctttgccgccggagcccagcctcaggtacttactctagtgcgtcctatcagctacccggtgggtcgtggaacccccatgttgaactccaaggtcggatgggaccacacccagaagtggctggtggccaagttcggcaaggaaacttcttctggtgagaccatcgtggaagtcgatctctccaaggaggatgatgctttcctggctggacacacgatcgacggacgtatcctcttcccggccactggctacatgactctggcttggcagacattcgctaagatgcagggaagtgagttccacaagaccccggtggtaatggagaacctcgtgttccaccgtgccactattcttaacaagaacgcagtggtcaagtttggcattaacttcttcgatggaactggcgcttttgagatttgtgagagcggtagcttggcggtttctggaaaaataaccattccagagtctattgacaacgaggagttgcccctggaggagcaaactcccagcgctgttgccaaggagctaggcaccaacgatgtctacaaggagctgcgcctccgaggctacgactatggtggaattttccgcggcattgttcgttctgacaccgtggcctccactggaaagcttcagtgggtggacaactggattagtttcatggacaccatgttgcagttcagtatccttagcaagaaccttcgtgagctgtacctgcccactcgcatcgagcgagcggtgattaatcccgccaagcactttgaattgctgagcgccctcaccaaggaggaacaggttgagactggactacctgtgcagtggtacagcgacattaacgtgatcaagagtgcgggcgtggagctgcgcggtctaaaggccaatctcgcccagcgtcgtcctggcacacaggcacctcccactctggagcgctaccagtttgtgcccaacatcaacaccacggatctaaatgaaaactctgagaaggctcgcctgcacgccttggatgtggccatccaggtgatcatcgagaactccagcggagccgtcaagctaaagggcgtggaattggccaatggacgcaaccccgacgttttggttgccaaccgcctgctgcagattatcgagggtgagcccgtgcttactggtgatgtggctgtggtcacctcgaacaacaatgaagagaccataaccgccgccctaggagattcaggagttcgagtggtgtccaaggacgtgctgaaggaaccggtagagcagaactgtcacttcgtctttggcatcgatgtcctttcccgaccggacaccaagaccctggagaactccattgccagcattcgcgagaacggtttcctgatccttgaggagacgctgcccacttacaccaagacaggccgtgccctgctgaccaaatttggattcgttgccgttcaggaacagagtctgggagccacccgtgtcctggtcctcgcccgcaaggctgttgatctgaaaactcgcaagtccgttgtggttgtggccaccgagcagaactttaactgggtggatgacttgaaggccgctctggctactgctgctacggaggagcagtatgtgtacgtggtttgccagggagaggagctgtttggagctgtgggtctgatgacgtgcatcaagaacgagaatggcggcaaactggctcgcctggtcttcgtgcaagatgccaaggctgagaagttctcccttacatcgaccctgtaccgccagcagctggagaaggacctcatctcgaacgtgctgaagaacggcgcttggggcactttccgtcacctgaaactggagacccagcaggccactctccaagtggagcatgcctatgtaaacgctctggtcaagggtgatcttgcttccctcaagtggatcgaggctgcccaggcggataccgctgcaactgtcgacaagaacctggaaacttgcaccgtctactatgcgcccatcaacttccgtgacgttatgttgacctctggtaagctggccgcggatgccttgcctggagatctggctgagcaagattgtgtgctgggtctggagttcgctggtcgcgatacccagggtcgtcgtgtaatggccatggtgccggctaaatcacttgctaccacctgcgtggcaagcaagcgcatgatgtggcaaatccctgagaagtggaccatggaagaggcttcgaccgttccttgcgtgtactccaccgtctactacgctctggttgtgcgaggacaaatgaagaagggtgagaagatcctcattcacgctggctccggaggagttggtcaggcggccatctctgtggctctggcccatggcttgaccgtgttcaccacggtgggcagcaaggaaaagcgcgagttcctgctgaagcgattccccaaactgcaggagcgtaacatcggcaactcccgagacacctccttcgagcagttggtcctgcgcgagaccaagggacgcggagtcgatctggtgctgaactcgttatctgaagagaaactgcaggcctcgatccgctgtttgggtctgaatggacgcttcctggagattggcaagttcgatttgagcaacaacagcccacttggaatgtccgttttcctcaagaacacctccttccacggcattttgcttgacagtgtgatggagggcgaggaggagatgcaaaaccaggttgtctccctggtcgctgagggcatcaagaccggagccgttgtaccccttccgacctcggtgtttaacgaccagcaggtggagcaggccttccgtttcatggcctctggcaagcacatcggcaaggtagtgatcaaggtgcgtgatgaggaggcaggcaagaaggcgctgcagcccaagccgcgcctgatcaacgccattccacgcacatacatgcacccggagaagagttacatcctggttggaggtcttggcggattcggtttggagctgaccaactggttggtgacgcgtggagcccgctacattgtgctgacctctcgttccggagttaagaccggctaccagggtctgatgatccgtcgctggcaggaacgtggcgtaaaggtggtgattgacaccagtgatgtgaccaccgccgctggagctaaaaagctgctggagaatagtaacaagctggctttggtcggaggcatcttcaacctggcggctgttctccgcgatgctctgatcgaggatcagaccgccaaggacttcaagacagtggctgatcccaaggtgacggccaccaagtacctggatcagttctctcgcgatatctgcactgagctggactacttcatctgcttctccagtgtttcctgcggtcgtggtaacattggtcagaccaactacggattggccaactctgcaatggagcgaatttgcgagcagcgccaggtgagcggattcccaggcaccgccatccaatggggagccatcggagacaccggtctggtgctggagaacttgggtgacaatgacaccgtgattggaggaaccctgccccagaggatgccctcttgcctgcagaccatcgacctgttcctgcaacagccccatccggttgttgcctccatggttgtggccgagaagcgcaagtcggatcagtcggctggagtcagcctaattgccaccattgccaacatccttggtctccgggacaccaagaatatccaggacggagcatcgcttgctgatctcggaatggactccctgatgagcgctgagatcaaacagactttggagcgaaactttgacattgttctgtccgcccaggagatccgtcagctcacctttggagccctcaaggccatggatggtggtgctgatgtcaagccagccgcagctgctcccgcagccgctgctggagtcccagaggcaaacattacctctggtggatcctcgcgcacagctagtcccatgggcgatggaacgcaggtggtgttcaccacgtccctcatccccaccgaggcaattgtacaactggacacaaaggcacctgcaaacagcaaacagagccccatcttcttcatttccccgatcgaggggttcgcctccgcactggagccgctggccaagcgattggaggtgcccgcctatggactgcagtacacggaagccgtgccctccgattctctggaatcagcagccaaattcttcatcaagcagctgcgcaccgtccagccaaagggtccctacaaactagccggatactccttcggttgcctgctcacctacgtgatggccggtattctggaagagaccaacgaggtggccaatgtgatcatgctggacggagccccaagctacgtcaactggtacacgagcagcttcaagcagcgttacactgacggcaccaacgccgataacgacaaccagagctacggcttggcctactttggaatcgtgttggccaacattgactacaaagcgctggtgcgtctgctaatagtgatccccacatgggaggagaaactcgagaggttcgctgagctgatgagcaatgagatcacccagcccgtggaaacgatcaagaaatccgccactctgttctacaagaaactggagctggccgatggctaccagcccactctgaagctcaagacgaatgtgaccttggtcaagcccacagacaactctgccaagctggacgaggactatcgccttaaggaggtctgcacaaagcccgtggaagtacacactgttgagggcaaccaccgcaccttcctcatcgaggatcagtccctgaagaccatccagagcatactgaagcgtctgttcaactaagctagaaagaggattagaataagagttgtgaatgtggcataggcccactacccacacgatcatcaccctctcaccgtcactcacccaatactcgggttctatgcaccatgtggaaccacggaacacatcgacacctagttagcatacttagtgaatgaatttacgttgttgagctgcaaggaatggctcgccccatcccagttacgcacagctagaagagataagttaacagattggatttgcgtcgatcggattgaatctgcctaactgctgtcttgcagggctgtaggcttcggtccaaaattaagtctacagtctctgcgattccgggcagttgaaatgatgcaagatgagaggctcagtccataacacttaacgctttgtgcaccgtacaatttagtacccgacattccttgagagctagacggcaccagacgtcccaacttaccaaatatatcttttatgctctatctataatgtatgtcgcatattctagttttattgcctagttgtaagcctacagtttgtagtcgcgcatgtaatgaatttcattcctcgaactaacccaagaaagagactacaacattcgttatctctcttgatgtataaaataatcgcccaaaaattatcactcatgaatattgtggatattaaaattacaccatactaaaaaat

SEQ ID NO: 172 - protein, 2438 aa, Drosophila melanogaster
  AAF51148
  GI:7295848
MPARFAEEVITAEPAQRAAPQLDLGGGHYVPRQQHLNDEIAITGFSGRLPESSTIEEFKQNLFDGVDMVNDDPRRWERGLYGLPDRIGKLKDSDLENFDQQFFGVHQKQAECMDPLLRMLLELTHEAIIDAGLNPSDLRGSRTGVYIGVSNSETEQHWCSDADRVNGYGLTGCARAMFANRISFTFDFKGPSYSIDTACSSSLYALEQAFSDMREGKVDNALVAGAGLILKPTMSLQFKRLNMLSPDGSCKAFDESGNGYVRSDGCVVLLLQRTSAARRVYASILNVRTNTDGFKEQGITYPIGKMQNRLIRETYEEIGLNPADVVYVEAHGTGTKVGDPQEVNSITDFFCKDRTTPLLIGSVKSNMGHSEPASGVCSVAKILIAMEEGVIPGNLHYNKPNPDLYGLVDGRLKVVDRNLPWNGGIIGLNSFGFGGANAHVILKSNPKPKALTPKDGALKVVLASGRTFEAVEQLLESASTNADDDEYLQLINEIHSKAIPNHFFRGYGVVSSKGTHQREVIESNDDKRPIWYIYSGMGSQWASMAKDLMKIEAFAKTIQRCADVLKPEGVDLIDVLTRSTDKSFENILNSFISIAAMQVALTDLLSSLGIHPDGIVGHSVGELGCAYADGCFTPEQTVLAAYWRGKSILDTQLAKGKMAAVGLSWEDAHSRVPSDCFPVCHNSEDNCTISGPEASIEALVAKLNAEGVFAKAVNSSGYAFHSKYIAEAGPKLRKSLEKIIPNAKNRTARWISTSIPESAWNTPVAKQSSAAYHVNNLLSPVLFHEALQHVPKNAISVEIAPHGLLQAILKRALGPDATNLSLVKRGHENNVEFFLTNVGKLFAAGAQPQVLTLVRPISYPVGRGTPMLNSKVGWDHTQKWLVAKFGKETSSGETIVEVDLSKEDDAFLAGHTIDGRILFPATGYMTLAWQTFAKMQGSEFHKTPVVMENLVFHRATILNKNAVVKFGINFFDGTGAFEICESGSLAVSGKITIPESIDNEELPLEEQTPSAVAKELGTNDVYKELRLRGYDYGGIFRGIVRSDTVASTGKLQWVDNWISFMDTMLQFSILSKNLRELYLPTRIERAVINPAKHFELLSALTKEEQVETGLPVQWYSDINVIKSAGVELRGLKANLAQRRPGTQAPPTLERYQFVPNINTTDLNENSEKARLHALDVAIQVIIENSSGAVKLKGVELANGRNPDVLVANRLLQIIEGEPVLTGDVAVVTSNNNEETITAALGDSGVRVVSKDVLKEPVEQNCHFVFGIDVLSRPDTKTLENSIASIRENGFLILEETLPTYTKTGRALLTKFGFVAVQEQSLGATRVLVLARKAVDLKTRKSVVVVATEQNFNWVDDLKAALATAATEEQYVYVVCQGEELFGAVGLMTCIKNENGGKLARLVFVQDAKAEKFSLTSTLYRQQLEKDLISNVLKNGAWGTFRHLKLETQQATLQVEHAYVNALVKGDLASLKWIEAAQADTAATVDKNLETCTVYYAPINFRDVMLTSGKLAADALPGDLAEQDCVLGLEFAGRDTQGRRVMAMVPAKSLATTCVASKRMMWQIPEKWTMEEASTVPCVYSTVYYALVVRGQMKKGEKILIHAGSGGVGQAAISVALAHGLTVFTTVGSKEKREFLLKRFPKLQERNIGNSRDTSFEQLVLRETKGRGVDLVLNSLSEEKLQASIRCLGLNGRFLEIGKFDLSNNSPLGMSVFLKNTSFHGILLDSVMEGEEEMQNQVVSLVAEGIKTGAVVPLPTSVFNDQQVEQAFRFMASGKHIGKVVIKVRDEEAGKKALQPKPRLINAIPRTYMHPEKSYILVGGLGGFGLELTNWLVTRGARYIVLTSRSGVKTGYQGLMIRRWQERGVKVVIDTSDVTTAAGAKKLLENSNKLALVGGIFNLAAVLRDALIEDQTAKDFKTVADPKVTATKYLDQFSRDICTELDYFICFSSVSCGRGNIGQTNYGLANSAMERICEQRQVSGFPGTAIQWGAIGDTGLVLENLGDNDTVIGGTLPQRMPSCLQTIDLFLQQPHPVVASMVVAEKRKSDQSAGVSLIATIANILGLRDTKNIQDGASLADLGMDSLMSAEIKQTLERNFDIVLSAQEIRQLTFGALKAMDGGADVKPAAAAPAAAAGVPEANITSGGSSRTASPMGDGTQVVFTTSLIPTEAIVQLDTKAPANSKQSPIFFISPIEGFASALEPLAKRLEVPAYGLQYTEAVPSDSLESAAKFFIKQLRTVQPKGPYKLAGYSFGCLLTYVMAGILEETNEVANVIMLDGAPSYVNWYTSSFKQRYTDGTNADNDNQSYGLAYFGIVLANIDYKALVRLLIVIPTWEEKLERFAELMSNEITQPVETIKKSATLFYKKLELADGYQPTLKLKTNVTLVKPTDNSAKLDEDYRLKEVCTKPVEVHTVEGNHRTFLIEDQSLKTIQSILKRLFN

SEQ ID NO: 173 - DNA, 1335 bp, Drosophila melanogaster
  Name: CG16752
  AE003434
  GI: 10728478
  Transcript: CT36050
atgccgcgtgtgaggcggtgcacggcgtatattgcattgctggcgtttctgcaccaactgcccagattcttcgacaggacgtacatgccgctggtgatcgagtggaacggcagcccaacggaggtgtgccacttggagacgtcgatgtgggtgcacgattacattggagtggacctatactacacaagctactatctgttccgggtgctgttcgtccacctgctgccctgcattatcctggttaccctgaacattctgctgttcgcggcgatgcggcaggcacaggagcgccgaaagctcctcttccgggagaaccggaagaaggagtgcaagaaactgagggagaccaattgcaccacgctgatgctaattgtggtcgtgtcggtgttccttctagccgagatacccattgctgtggtcactgcgatgcacatcgtcagtagcctgattatcgagttcctggactatggactggccaacatttgcatcatgctgacgaacttcttcctggtattcagctatccgatcaacttcggcatttactgcggcatgtcgcgccagtttcgggagactttcaaggagatattcctcggtcggctgatggccaaaaaggatagctccacaaaatactcgatcgttaatggcgcccgcacctgcaccaacaccaacgagacggtcctctagtaattggtgatgttggtgccgcggcggggcagcagcgaccatcgtcgcagctccactagcaccaccaccaccaccaccaccaagaccattggtgggtcaatgatcatcggtggtgaggcctcggcgcagcaccagcatctggtaacgcaccatctgcagacccactcacagcccagtcagcagcggcgggtcagcaccatggacatcatcaccgaggagcggattttgtaaactggatgcgagaatcggatgggttcggaatcgattgggtgcggctatcggaaatcagagatcccaatatactgttgaaaactatcggctgcctgccgaggagcgcaatttacaatacagttctttattcgtcaatggtctcagcatgaaattttaacagaatttgcaattgcaactaatccagcaaaaatcaaaagaactccactacacaaatggttttttttcgaacagagctaagaagtaaggtttcaggagaaaactacaatacataggtacacaggaacttgtttaattaaaaacactaatatatcaatatcaaaataaccaaaaatgcgtagagtatttggaatgatgcagtctgaattttgatggattttgcaaatgagcgattttcacttttaaataacttaaggcagttta

SEQ ID NO: 174 - protein, 435 aa, Drosophila melanogaster
  AAF46037
  GI:7290587
MDNYTDVLYQYRLAPSASPEMEMELADPRQMVRGFHLPTNESQLEIPDYGNESLDYPNYQQMVGGPCRMEDNNISYWNLTCDSPLEYAMPLYGYCMPFLLIITIISNSLIVLVLSKKSMATPTNFVLMGMAICDMLTVIFPAPGLWYMYTFGNHYKPLHPVSMCLAYSIFNEIMPAMCHTISVWLTLALAVQRYIYVCHAPMARTWCTMPRVRRCTAYIALLAFLHQLPRFFDRTYMPLVIEWNGSPTEVCHLETSMWVHDYIGVDLYYTSYYLFRVLFVHLLPCIILVTLNILLFAAMRQAQERRKLLFRENRKKECKKLRETNCTTLMLIVVVSVFLLAEIPIAVVTAMHIVSSLIIEFLDYGLANICIMLTNFFLVFSYPINFGIYCGMSRQFRETFKEIFLGRLMAKKDSSTKYSIVNGARTCTNTNETVL

SEQ ID NO: 175 - DNA, 1395 bp, Drosophila melanogaster
  Name:Rpt1
  AE003840
  GI: 10727757
  Transcript: CT3016
aaattgttcagtcattctcgccgtaaaacaaaaggaaaacatcgcataaactcattttttgccttaaaaaccgtacaattgcaatcgaataagatgccggactacctgggcgacgaccagcgcaaggtgaagcacgatgagaaggaggacaaggagatcaagtccctcgacgaaggcgacattgagcttctaaagacttatgggcagagccagtatcacaaatccatcaagagcatcgaggaggacattcaaaaggctgtgaagcaggtgaacgagctgactggaatcaaggaaagcgacacgggtctggcgccaccagcgctctgggatttggccgccgacaagcagatcctgcaaaacgagcaaccgctgcaggttgcccgatgcaccaagatcatcaacgcggattccgacgaccccaagtatatcatcaatgttaagcagttcgccaagttcgtggtggacctagctgactcggtggcccctactgacatagaagagggaatgcgtgtgggtgtcgaccgcaacaagtaccagatccacattccgctgcctcccaagattgatcctacggttaccatgatgcaggttgaggacaagccggacgtcacctacagcgatgtgggcggctgcaaggaacaaatcgaaaagctgcgcgaggtggtggagacgccactgctgcacccggaaaagttcgtcaatctgggtattgagccgcccaaaggtgtgctactgtttggcccaccgggaacgggaaagaccctgtgtgcccgcgccgttgccaaccgcacggacgcttgctttatccgcgtcattggctctgagctggtgcaaaagtacgtgggtgagggcgctcgtatggtgcgcgagctcttcgaaatggcgcgttccaaaaaggcttgtctcatcttcttcgacgaaattgatgctatcggtggtgcccgattcgacgatggggccggcggcgacaacgaggtgcagcgcaccatgttggagctgattaaccaactggatggcttcgatccgcgcggaaatatcaaggtgctgatggccaccaaccgacccgacacgttggatccggcgctcatgcgtcccggtcgtctggaccgaaaggtggagttcggcctgcctgaccaggacggtcgctcgcacatctttaagattcacgcccgctccatgtccgtggagcgagatattcgcttcgatctgctggcgcgtctatgtcccaactcgactggtgctgagatccggtcagtatgcacggaagcgggcatgttcgccattcgggcgcgtcgcaaggtggccacagagaaggatttcctcgaagccgtcaagaaggttatcaagagctacgccaagttcagcgccactccacgctacatgacctacaactaa

SEQ ID NO: 176 - protein, 433 aa, Drosophila melanogaster
  AAF59219
  GI:7304183
MPDYLGDDQRKVKHDEKEDKEIKSLDEGDIELLKTYGQSQYHKSIKSIEEDIQKAVKQVNELTGIKESDTGLAPPALWDLAADKQILQNEQPLQVARCTKIINADSDDPKYIINVKQFAKFVVDLADSVAPTDIEEGMRVGVDRNKYQIHIPLPPKIDPTVTMMQVEDKPDVTYSDVGGCKEQIEKLREVVETPLLHPEKFVNLGIEPPKGVLLFGPPGTGKTLCARAVANRTDACFIRVIGSELVQKYVGEGARMVRELFEMARSKKACLIFFDEIDAIGGARFDDGAGGDNEVQRTMLELINQLDGFDPRGNIKVLMATNRPDTLDPALMRPGRLDRKVEFGLPDQDGRSHIFKIHARSMSVERDIRFDLLARLCPNSTGAEIRSVCTEAGMFAIRARRKVATEKDFLEAVKKVIKSYAKFSATPRYMTYN

SEQ ID NO: 177 - DNA, 3319 bp, Drosophila melanogaster
  Name: wts
  AE003775
  GI: 7301969
  Transcript: CT4806
atgcatccagcgggcgaaaaaaggggcggtcgccccaatgataaatacacggcggaagccctcgagagcatcaagcaggacctaacccgatttgaagtacaaaataaccataggaataatcagaattacacacctctgcgatacacggcgaccaacggacgcaacgatgcacttactcctgactatcaccacgccaagcagccgatggagccgccaccctccgcctctcctgctccggacgtggtcataccgccgccgcccgccattgtaggtcagcccggagccggctccatatccgtatccggtgtgggcgttggagtggtgggtgtggcgaacggacgtgtgccaaagatgatgacggccctaatgccaaacaaactgatccggaagccgagcatcgaacgggacacggcgagcagtcactacctgcgctgcagtccggctctggactccggagccggtagctcccgatcggacagcccccattcgcaccacacccaccagccgagctcgaggacggtgggtaatccaggtggaaatggtggattttctccgtcgccaagcggtttcagtgaggtggctccaccggcgccgccgccacgcaatcccaccgcctgcagcgcggccacgcccccaccgccagtgccgcccactagccaggcgtacgtgaagcggcgatcaccggccctgaacaaccgcccgccggcgatagcgccacccactcagcggggcaactcacctgtaataacccagaacgggctgaagaacccgcagcagcagttgacgcagcagctgaagtccctgaacctatacccaggcggaggcagtggagcagttgtggagccaccgccgccctacctaattcaaggcggagccggaggagcagcaccgccgccgccaccacccagttacacggcctccatgcagtcgcggcagtcgcccacacaatcccaacaatcggactacaggaaatccccgagcagtgggatatactcggccacctcggcgggctcgccgagccccataactgtgtccctgccgccggcgccgctggcgaagccacaaccacgagtctaccaggccaggagtcagcagccgatcatcatgcagagtgtgaagagcacgcaggtccaaaagcccgtgctgcaaacagcagtggcgccccaatcgccatcgagtgcctcggccagcaattcaccagtccacgtgctggccgctccaccctcttaccctcagaagtccgcggcagtggtgcagcagcagcaacaggcagcagcggcggcccaccagcagcagcatcagcaccagcaatccaaaccaccaacgcccaccacaccgcccttggtgggtctgaatagcaagcccaattgcctggagccaccgtcctatgccaagagcatgcaggccaaggcggccacggtggtgcagcagcagcaacagcagcagcagcagcaacaacaggtccagcagcagcaggtgcaacagcagcagcagcagcagcaacagcaactgcaggccttgagggtgctccaggcacaggctcagagggagcgggatcaacgggagcgggatcaacgggagcgggaacgggatcagcagaagctggccaacggaaatcctggccggcagatgcttccgccgccgccctatcagagcaacaacaacaacaacagcgagatcaaaccgccgagctgcaacaacaacaacatacagataagcaacagcaacctggcgacgacaccacccattccgcctgccaaatacaataacaactcctccaacacgggcgcgaatagctcgggcggcagcaacggatccaccggcaccaccgcctcctcgtcgaccagctgcaagaagatcaagcacgcctcgcccatcccggagcgcaagaagatctccaaggagaaggaggaggagcgcaaggagttccgcatcaggcagtactcgccgcaagccttcaagttcttcatggagcagcacatagagaacgtgatcaagtcgtatcgccagcgcacgtatcgcaagaatcagctggagaaggagatgcacaaagtgggactgcccgatcagacccaaatcgagatgaggaaaatgctgaaccaaaaggagagcaactacattcgattgaagcgcgccaagatggacaagagcatgttcgtcaaactgaagcccattggagtgggtgcatttggcgaggtaacgctggtgagcaaaatcgatacctcgaaccatttgtatgcgatgaaaaccctgcggaaagcggacgttctcaagcggaatcaggtggcacacgtgaaggccgagagggatatcctcgcggaagccgacaataactgggtggtgaagttgtactacagcttccaggacaaggataatctgtactttgtgatggactacataccaggtggtgatctgatgtcgctgctcatcaaactgggcattttcgaggaggaactggccagattctacatcgccgaggtcacctgcgccgtggacagcgttcacaaaatgggcttcattcacagagacatcaagcctgacaacatactcatcgatagggacggacacataaagctcaccgactttggcctgtgcacgggattccgatggacgcacaactcgaagtactaccaggagaacggcaatcactcgcgccaggactcgatggagccctgggaggaatactccgagaacggaccgaagcccaccgtgctggagaggcgacggatgcgcgatcaccaaagagtcctggcccactcgctggtgggcaccccgaactacatagctcccgaggtgctggagagaagtgggtacacgcagctgtgcgactactggagcgtgggcgtcatcctctatgagatgctggtgggtcagccgccctttctggccaacagtccgctggaaacgcaacaaaaggtcatcaactgggagaaaaccctgcatattccgccgcaggccgagttatcccgcgaggctacggacttgataaggaggctctgtgcgtcggctgacaagcggctgggcaagagcgtggacgaggtcaagagccacgacttcttcaagggcatcgactttgcggacatgcggaagcagaaggcgccctatataccggaaatcaagcacccgacggacacatccaactttgatcccgtggatccggagaagctgcgctcgaatgactccaccatgagcagcggcgatgatgtcgaccagaacgaccgcaccttccacggctttttcgaatttaccttccgtcgcttcttcgacgacaagcagccgccggatatgacggacgatcaggcgccggtttacgtctgaa

SEQ ID NO: 178 - protein, 1105 aa, Drosophila melanogaster
  AAF57085
  GI:7301980
MHPAGEKRGGRPNDKYTAEALESIKQDLTRFEVQNNHRNNQNYTPLRYTATNGRNDALTPDYHHAKQPMEPPPSASPAPDVVIPPPPAIVGQPGAGSISVSGVGVGVVGVANGRVPKMMTALMPNKLIRKPSIERDTASSHYLRCSPALDSGAGSSRSDSPHSHHTHQPSSRTVGNPGGNGGFSPSPSGFSEVAPPAPPPRNPTACSAATPPPPVPPTSQAYVKRRSPALNNRPPAIAPPTQRGNSPVITQNGLKNPQQQLTQQLKSLNLYPGGGSGAVVEPPPPYLIQGGAGGAAPPPPPPSYTASMQSRQSPTQSQQSDYRKSPSSGIYSATSAGSPSPITVSLPPAPLAKPQPRVYQARSQQPIIMQSVKSTQVQKPVLQTAVAPQSPSSASASNSPVHVLAAPPSYPQKSAAVVQQQQQAAAAAHQQQHQHQQSKPPTPTTPPLVGLNSKPNCLEPPSYAKSMQAKAATVVQQQQQQQQQQQQVQQQQVQQQQQQQQQQLQALRVLQAQAQRERDQRERDQRERERDQQKLANGNPGRQMLPPPPYQSNNNNNSEIKPPSCNNNNIQISNSNLATTPPIPPAKYNNNSSNTGANSSGGSNGSTGTTASSSTSCKKIKHASPIPERKKISKEKEEERKEFRIRQYSPQAFKFFMEQHIENVIKSYRQRTYRKNQLEKEMHKVGLPDQTQIEMRKMLNQKESNYIRLKRAKMDKSMFVKLKPIGVGAFGEVTLVSKIDTSNHLYAMKTLRKADVLKRNQVAHVKAERDILAEADNNWVVKLYYSFQDKDNLYFVMDYIPGGDLMSLLIKLGIFEEELARFYIAEVTCAVDSVHKMGFIHRDIKPDNILIDRDGHIKLTDFGLCTGFRWTHNSKYYQENGNHSRQDSMEPWEEYSENGPKPTVLERRRMRDHQRVLAHSLVGTPNYIAPEVLERSGYTQLCDYWSVGVILYEMLVGQPPFLANSPLETQQKVINWEKTLHIPPQAELSREATDLIRRLCASADKRLGKSVDEVKSHDFFKGIDFADMRKQKAPYIPEIKHPTDTSNFDPVDPEKLRSNDSTMSSGDDVDQNDRTFHGFFEFTFRRFFDDKQPPDMTDDQAPVYV

SEQ ID NO: 179 - DNA, 3867 bp, Drosophila melanogaster
  Name: CG1582
  AE003484
  GI: 7292554
  Transcript: CT4155
atggacgaatcctcgagaaagcacatggaggactgcttcctacgcagtcccagcgacatccgtaccaccaacgtgcccgcggcgcctaaatcgcaggcggctgacaacaagtctcggaaaacggagctccacgtccttcggctcaacgatgaatcccgccagatgaccatggacacgctgcgccaaatccacggcccggaattccagctggacgacatcagcaagtacaaggatcgtggacgcggaggtcatggcgtgaagcactcctactggcaggatcgcggcaccctggtggtgcagagtgtccagggcgtgagctcaacgcgtggcaacgacagtgatggtgatcgcctgcgccgatatgccttggccaaactggagaactacggatttcaggctgtccactgccttgaagcttatgagcactgctccggcgacacggaagccgctctactgctgctctaccgtcgctatatgagaattcccgatgaggagcaactgactctcgagccacccagcgagcaagaaatactggacatgcgcgccgacgagaaggaggccctggagtccatcttcgataaggcgtacgaggagcgcgaggcgaatcgcgtgtggaacctaaagtttcgcatcgaccatctgctggcccacagtccgtcggaggtgcgaaaggccagggaggcggtcctggccgccgctgctgctgctgcccaggcggcgctcgacaagaagaaaaagcctcctctacgttgtcgcaatttcgatcgtgacggcacctgtaagtacggtcccaagtgccggttcgctcacctgccgcaacaacccactgaatcggacacgaccaaaaaggatagcgttgacgagaacgataacgagctgtggtttcacgtggaagtgcgctttccgccaggcagtcgctatccatatgaggcgcctttcatctacctgaaaaccacttgccacgacataccgcacgaactgcgcctccggtatgcccgccatctctacaaggaggccaaagagatatgccgggatggcattccctgtgtatacagcatatgcgacctgctgcagtccaatgaacagctggccggacgactagacacgtctgcttttccctcgcccaagcgatcactcttctacgatgagccggcgggcggtggagtgaatccggatgccgagcatcatcaatcaccgaaaccatcgcactacgcacgtggtcaaacgtcgcgaaatgatggaggccaccagcgaaacgtggaagcgcagacgagagagaaccgtcgccttttgcaacagttcgtggagcgacgaaaggaagaacgctaccagaagatcattgatggacgaaaacagctgcccgccttcgccgaaattgaacgtattctggcgctaatagaaagttcgccggtagtggtaatatctggtgaaacgggttgcggcaagagtacccaagtgccgcagttcattttggacaattggttcttccgcgcacttcaactgccagcaaaggagaacttgccccacgtggaaatcatctgcacgcaaccgcgacgactctcagccatcggagtggcggagcgagtggctgccgagcgtctggatcgcattggtcagctggtgggctaccagatccgactggaaaacaaggtgtcgcaaagcacgcgactcagtttttgcaccacgggcatcttgttgcggcgactggcctcggatccgctactaggaagcgttacccacgtcatagtggacgaagtacacgagcgatctgaggagtccgatttcctactgctaattctcaagaatctgctgcgagagcgcaaggatctaaaagttattctcatgtcggccacgctcaatgccgccctcttttcggattactttggcggagctcccgtgctagatattcctggtcgaacgtttccagtacagcagctctttttggaggatatcctggagatgagcgactttgtcatggaatacgacactaagtactgccgcaagcttaaaaagcaggagcaggaaatactggagcgtgagctggagtacgctgatgtgcaggcttcgggagaagcgccaggcaaaaagatcaaggatgaaaagctaactctggcggagacttatcagcgatacgcggaatatagcaagcccacgtgcaagagtatttacctgatggagcccatgactataaatccagaactgatcgaatccgtactgaaatacattgttgaaggttctcacgattggccgcgcgaaggaaccatcctcatcttcctgcctggtttcggggagatccaatccgtgcacgattccttgctggacaatgcactcttttccccacgcgccggcaaatttatcctggtgccattgcactcggccctttctggcgaggatcaggcgctagtcttcaaaaaggccccgcccggtaaacgaaagatcgtgttgagcacaaacatagctgagacatcggtgaccatcgacgactgtgtgttcgtggtggactgcggcctgatgaaggagaagtgtttcgactcaaaccgcaacatggagtcactggacctagtctgggtgtctcgtgccaatgcaaagcagcgcaagggtcgtgccggccgtgtgatgccgggtgtgtgtatccacctatacaccagctaccgctatcaataccacattctggcccaaccggtgccagagatccagcgagtgccactcgagcaaattgtgctgcgcatcaagacgttgcaaacgttcgcctcacgcaacacgctctctgttctgctggagacactggaggcgccaacagaggacagtgtactaggtgcattgacacgattgagggatgtgggcgcgctcgatgcagaggatcaattaaccccgcttggtcatcatttggcagcccttcctgtcgacgtgcgcatcggcaagctgatgctgtatggagcgatcttccagtgtctggacagcgtgctgaccatcgccgcctgcctgagcaacaagtcgcccttcgtaagtccgctcaacaagcgcacggaggcggacaagtgcaaacggatgtttgcactgggcaacagcgatcatttgaccgtcctgaatgcgtataggaaatggctggatgttgcgcgaaggggaaactatgcagccagcagaaactacgccagtgagcacttcctgtcgctgaacacacttgaaacgatagctgatctcaagtatcaatacctggagctactcgtttccattggctttgtgccgatcgatgtgccgcgtaggcgcaaaaatgcctgcgacaatatactgacactaacaggtgtggagcagaaccacaacggtgataacaacaggctgctgacctcgctcctctgcgccgccctctatccaaacatcgtgaagattatgacgccggatcgcgtctacatccaaacagctggtggtgctgtgccgcgtgagccgagccaccatgatctgcgcttcaagacgcgcggcgatggttacgtgaagattcatccgtcgtcggttaactcgcaggtgtccgtcttccaggcgccgttcctcgtcttccaggagaaggtacgcaccagcgccatctacatccgcgactgttcgatgttgccgctcatcgccatggtcctgtttgccggcagcgattttaaggtggagctacacgatggggacttcctttttctgctggaaagcggttggattatattgaaggcccacgatctagagactgctgagatggtacagtgcctgcgggcggagatgatcaagctgctcgaggagaagattcgcgatccgtgccttaatctgctgcaccacaaaaacggctgccgtatgatcgccaacatcgttcacttgattagtaaaaacagctga

SEQ ID NO: 180 - protein, 1288 aa, Drosophila melanogaster
  AAF47973
  GI:7292573
MDESSRKHMEDCFLRSPSDIRTTNVPAAPKSQAADNKSRKTELHVLRLNDESRQMTMDTLRQIHGPEFQLDDISKYKDRGRGGHGVKHSYWQDRGTLVVQSVQGVSSTRGNDSDGDRLRRYALAKLENYGFQAVHCLEAYEHCSGDTEAALLLLYRRYMRIPDEEQLTLEPPSEQEILDMRADEKEALESIFDKAYEEREANRVWNLKFRIDHLLAHSPSEVRKAREAVLAAAAAAAQAALDKKKKPPLRCRNFDRDGTCKYGPKCRFAHLPQQPTESDTTKKDSVDENDNELWFHVEVRFPPGSRYPYEAPFIYLKTTCHDIPHELRLRYARHLYKEAKEICRDGIPCVYSICDLLQSNEQLAGRLDTSAFPSPKRSLFYDEPAGGGVNPDAEHHQSPKPSHYARGQTSRNDGGHQRNVEAQTRENRRLLQQFVERRKEERYQKIIDGRKQLPAFAEIERILALIESSPVVVISGETGCGKSTQVPQFILDNWFFRALQLPAKENLPHVEIICTQPRRLSAIGVAERVAAERLDRIGQLVGYQIRLENKVSQSTRLSFCTTGILLRRLASDPLLGSVTHVIVDEVHERSEESDFLLLILKNLLRERKDLKVILMSATLNAALFSDYFGGAPVLDIPGRTFPVQQLFLEDILEMSDFVMEYDTKYCRKLKKQEQEILERELEYADVQASGEAPGKKIKDEKLTLAETYQRYAEYSKPTCKSIYLMEPMTINPELIESVLKYIVEGSHDWPREGTILIFLPGFGEIQSVHDSLLDNALFSPRAGKFILVPLHSALSGEDQALVFKKAPPGKRKIVLSTNIAETSVTIDDCVFVVDCGLMKEKCFDSNRNMESLDLVWVSRANAKQRKGRAGRVMPGVCIHLYTSYRYQYHILAQPVPEIQRVPLEQIVLRIKTLQTFASRNTLSVLLETLEAPTEDSVLGALTRLRDVGALDAEDQLTPLGHHLAALPVDVRIGKLMLYGAIFQCLDSVLTIAACLSNKSPFVSPLNKRTEADKCKRMFALGNSDHLTVLNAYRKWLDVARRGNYAASRNYASEHFLSLNTLETIADLKYQYLELLVSIGFVPIDVPRRRKNACDNILTLTGVEQNHNGDNNRLLTSLLCAALYPNIVKIMTPDRVYIQTAGGAVPREPSHHDLRFKTRGDGYVKIHPSSVNSQVSVFQAPFLVFQEKVRTSAIYIRDCSMLPLIAMVLFAGSDFKVELHDGDFLFLLESGWIILKAHDLETAEMVQCLRAEMIKLLEEKIRDPCLNLLHHKNGCRMIANIVHLISKNS

SEQ ID NO: 181 - DNA, 1221 bp, Drosophila melanogaster
  Name: CG12289
  AE003544
  GI: 10727982
  Transcript: CT19318
tcgatttaaattaagggcagagaatcgaagaaagaagtagaggaggatctggatacgaaatcagagctttagacaatcgccaggatgacgcaatggtgtgctatcagtgtaatgaaggccgtgctctgcgtcggctgcacggaggtggactacgtgaccaccatggataaggtcgacttccagtgcgacaggtgcagcacccagaatggaatgcttcagcgcagcggaagatcctcgaatgttagtacggccctgcgtctgttgggcgccaatgtggagttgttcggtgtgctcacccgtaatcccacctatcgcatgattctggatgatctcgagcagcggggcattgatattagccattgtacattcacggacgcaagtcctcccttttccacaattgtccaagatcgctggacgcgtcgttgcacggtggtgtattgcgacaagtcatttccatatgttacggcagcggatttccgcaaattggatctcgatcaatacggctgggtgaattttgaggcacggagtccacgtgaaacttgcgatatgatacgcctaatcctcgatcacaacaacgggcgggatgaacgggatcggatagtggtatcgttgcagattttcaattccttcgaacaggtcgtgcatctgattgccatgtgcgactatgtgttcgtcaccaagtatatagccgagtccagaggctggaagtcaccgctggaagcctgcgagggtgtcaatgcgctactgcgcatgccaaggaacattagaattcgcagaccctgcatcattgtgccgtggagcagcctgggagcaggatgtatgaccacggaaggggagtacttcgaagtgccagcacacaagccgaaaaagatcatcgatcgggtgggcgatagtgattgcttcacggcgggcttcatttatgccgcttttgtgcggcaaaggcgattggccgaagccgtggacttcgccaatgctgtggccagctataagttgggctatgtgggtttcgattgcctgggtcatttgccaatcgatgcggttaagctgcccgttagaatgaggtgtggcagtgaggtgtcctccgacgatgaggataacggcgatcagttgaatagctgcaagaagcacctgttacgcccgattgagttcctgccggaaaagtcctccattgcacccactgagaaggaagttccgatcgagacttcgcaactttctagctag

SEQ ID NO: 182 - protein, 369 aa, Drosophila melanogaster
  AAF50065
  GI:7294728
MKAVLCVGCTEVDYVTTMDKVDFQCDRCSTQNGMLQRSGRSSNVSTALRLLGANVELFGVLTRNPTYRMILDDLEQRGIDISHCTFTDASPPFSTIVQDRWTRRCTVVYCDKSFPYVTAADFRKLDLDQYGWVNFEARSPRETCDMIRLILDHNNGRDERDRIVVSLQIFNSFEQVVHLIAMCDYVFVTKYIAESRGWKSPLEACEGVNALLRMPRNIRIRRPCIIVPWSSLGAGCMTTEGEYFEVPAHKPKKIIDRVGDSDCFTAGFIYAAFVRQRRLAEAVDFANAVASYKLGYVGFDCLGHLPIDAVKLPVRMRCGSEVSSDDEDNGDQLNSCKKHLLRPIEFLPEKSSIAPTEKEVPIETSQLSS

SEQ ID NO: 183 - DNA, 2481 bp, Drosophila melanogaster
  Name: Pepck
  AE003799
  GI: 10727469
  Transcript: CT30577
ttactcgtggccagagtaaatggaaagatcaagtgaaaagcctactttcagtggtctgaaaatcaagttgatgtttgacaaaaaactgtggaagaacatatgaacgcaaagtcctcgacagtagaacactaattgtgataattactcaaattgtgataagcgaattaagcaaagtgccaaaaaccctttcacgcgcagaaaaatctaataaaaatattccaaactttttttcgagaaaaattcataaaaaacaacacaaacaaaatgcctgagctcattgaacaaagcaaaattatctccggcaatgtctgcggtctgccccagttgcacaagctgcgccaggacaattgcggtctgtacagccacatccgtggcattcccatctcctatggaaatgtggatttgctgaccaccggtgtccgtgccttcgtggaggagggcatcgccctctgccagcccgaccaggtgcacatctgcgatggcagcgagcaggagaacaaggtgctcatcaagagcctcttggaggctggcaccattgtgccgctgcccaagtacgacaattgctggctggcccgcaccaatccggcggatgtggcccgcgtcgagtcgcgcactttcatctgcaccgagcggcgggaggagacgattcccactccagtggagggtgtcaagggaaccctgggcaactggatctcgcccagcgacatggatgctgcagtgcagcagcgattccccggctgcatgaagggtcgcaccatgtacgtggtgcccttcagcatgggtcctgtgggctccccgctctctaagatcggaatcgaactgacggactctgcttacgtggtggcctccatgaggatcatgacacgcatgggagccgctgtcttgcgccagctggccaagaaggaggaattcgtccgcgccctacactctgtgggcgcccctgccaacggacaggtggagcagccatcctggccttgtgatcccgaacgcaccatcatcctgcacaagcccgccgagaaccttattgtgtcttacggatcgggctacggcggcaactcgctgctgggcaagaagtgcttcgccctgaggattggcagcaccattgccaagcaggagggctggctggccgagcacatgttgattctgggcatcaccgatcccaagggcgagaagaagtacatcactgccgcctttccctcggcctgtggcaagaccaatctggccatgctgaatccctcgttggccaactacaaggtggaatgcgtgggcgacgacattgcgtggatgaagtttgactcgcagggagtgctgcgtgccatcaacccagagaatggattctttggtgtggctccaggaacctcaatggagaccaatcccattgccatgaacactgttttcaagaacaccatcttcacgaacgtggcctccacctctgatggcggtgtgttctgggagggcatggaaagcagtctggctcccaatgtccaaatcactgactggttgggcaaaccctggaccaaggattccggcaagcccgctgcgcatcccaactcccgcttctgcactccagccgcccagtgcccgattatcgatgaagcctgggaagatccggcgggagtgcccatctccgccatgctcttcggaggacgtcgtcccgccggagtgcccctaatctatgaggctcgggactggacccacggagtcttcattggagcagccatgaggagtgaggccactgctgcggccgagcacaagggcaaggtgatcatgcacgatccgttcgccatgaggcccttctttggctacaactttggcgactacgtggcccactggctgagcatggagaagcgtggtcaggtgccaaagatcttccacgtcaactggttccgcaagagtgccgagggcaagttcatgtggcccggatacggagagaactcccgtgtgctggaatggatcctgcgcagggtcaatggcgaatcctgctacgtggactcggccattggacacattcccgccgagggtgccctaaacctcgatggcatgaaggataaggtggacgtgaaggagatcttctcgctgcccaaggagttctggtcgcaggaggtcaaggatattcgcacctacttcgagtcacaggtgggcgccgatcttccggccagcatttaccagcagctggacgagctatcttcccgcgtagacaacctgtaagaaggatcaatgaggagagtcccatctacagcatctttacctgcccacacacctgctcacccactgtgctatcccgtactgaccccatcaccaacccaatttgttaacctgtcctaaatacctgtccccaataccttatttagtcgtttctctagttcttaagccgaagacttccaaactatttattatataagcagccataagattagcaagtaggccatacaaacagagaaaattaaaaaaaaaataaaacaacacgattttataacctac

SEQ ID NO: 184 - protein, 647 aa, Drosophila melanogaster
  AAF57676
  GI:7302595
MPELIEQSKIISGNVCGLPQLHKLRQDNCGLYSHIRGIPISYGNVDLLTTGVRAFVEEGIALCQPDQVHICDGSEQENKVLIKSLLEAGTIVPLPKYDNCWLARTNPADVARVESRTFICTERREETIPTPVEGVKGTLGNWISPSDMDAAVQQRFPGCMKGRTMYVVPFSMGPVGSPLSKIGIELTDSAYVVASMRIMTRMGAAVLRQLAKKEEFVRALHSVGAPANGQVEQPSWPCDPERTIILHKPAENLIVSYGSGYGGNSLLGKKCFALRIGSTIAKQEGWLAEHMLILGITDPKGEKKYITAAFPSACGKTNLAMLNPSLANYKVECVGDDIAWMKFDSQGVLRAINPENGFFGVAPGTSMETNPIAMNTVFKNTIFTNVASTSDGGVFWEGMESSLAPNVQITDWLGKPWTKDSGKPAAHPNSRFCTPAAQCPIIDEAWEDPAGVPISAMLFGGRRPAGVPLIYEARDWTHGVFIGAAMRSEATAAAEHKGKVIMHDPFAMRPFFGYNFGDYVAHWLSMEKRGQVPKIFHVNWFRKSAEGKFMWPGYGENSRVLEWILRRVNGESCYVDSAIGHIPAEGALNLDGMKDKVDVKEIFSLPKEFWSQEVKDIRTYFESQVGADLPASIYQQLDELSSRVDNL

SEQ ID NO: 185 - DNA, 876 bp, Drosophila melanogaster
  Name: CG5665
  AE003591
  GI: 10726906
  Transcript: CT17896
atgcattttcagtacatgacgccgtgccagaactacagtgtgcccctgctggaggcctcgaagctgtggaagcactctcgattcagcaagggacgtaaggtggtaattctggccaccggatggaccaacaccgtaaacgaatcctcggccatttcgatgatctctaaggcattcatgtgtcgtggcgatgtgaattttgtgattgtagatgcggctgactatgtggacaccttctacgcgtggtcggcgctgaacacggatttaattggagagcatattggagttggtctgacccaccttatagagctgaccccacttcgaaatattcacttgattggacattcactaggagctcacattatgggcactgctggtcggacttttaagaagcttaccggaaaacttatacccaggataactggcttggatccggccaagccatgtttcaggcgggaaaagattctgccaggattgacgcgtggcgatgccaagctagtggacataatccacaccaacattggtattttggccaagcgtggacccctcggtgatgtggacttctatcccggcggagcacatcccatccagccaggctgcctaaccatcggatgctctcatacccgagccgttgagtatttcgccgagagtgcatatccacaccaagagaagaactttatgggcaagaagtgcgcttcttgggatgagctaagaaaacgggattgttctgctggcatagtttccccgatgggctatcgaatgaatccccaagccaggggcatctactacgtagatgtcaatggctggcccccttacggccgaaactcggagaacactgttgatcctaggcttaaaacgtgctacttgtgccggaggtga

SEQ ID NO: 186 - protein, 291 aa, Drosophila melanogaster
  AAF51579
  GI:7296289
MHFQYMTPCQNYSVPLLEASKLWKHSRFSKGRKVVILATGWTNTVNESSAISMISKAFMCRGDVNFVIVDAADYVDTFYAWSALNTDLIGEHIGVGLTHLIELTPLRNIHLIGHSLGAHIMGTAGRTFKKLTGKLIPRITGLDPAKPCFRREKILPGLTRGDAKLVDIIHTNIGILAKRGPLGDVDFYPGGAHPIQPGCLTIGCSHTRAVEYFAESAYPHQEKNFMGKKCASWDELRKRDCSAGIVSPMGYRMNPQARGIYYVDVNGWPPYGRNSENTVDPRLKTCYLCRR

SEQ ID NO: 187 - DNA, 1356 bp, Drosophila melanogaster
  Name: CG7285
  AE003520
  GI: 10727839
  Transcript: CT22465
atgacagccgattcagaggcaaatgccacaaattggtataacacgaacgagagcttatataccacggaactgaaccatagatggattagtggtagttccacaattcagccagaggagtccctttatggcactgatttgcccacctatcaacattgcatagccacgcggaattcctttgctgacttgttcactgtggtgctctacggatttgtgtgcattatcggattatttggcaacaccctggtgatctacgtggtgttgcgcttttccaaaatgcaaacggtcacgaatatatatatcctgaatctggcggtggcagacgagtgcttcctgattggaataccctttctgctgtacacaatgcgaatttgcagctggcgattcggggagtttatgtgcaaagcctacatggtgagcacatccatcacctccttcacctcgtcgatttttctgctcatcatgtccgcggatcgatatatagcggtatgccacccgatttcctcgccacgatatcgaactctgcatattgccaaagtggtctcagcgattgcctggtcaacttcagcggtcctcatgctgcccgtgatcctttatgccagcactgtggagcaggaggatggcatcaattactcgtgcaacataatgtggccagatgcgtacaagaagcattcgggcaccaccttcatactgtacacatttttcctaggattcgccacaccgctgtgctttatcctgagtttctactacttggttataaggaaactgcgatcggtgggtcccaaaccaggaacgaagtccaaggagaagaggcgggctcacaggaaggtcactcgactggtactgacggtggccctgattcactcgaatcccgcgcaaagggacctctcccgactggaaatactcattttcctacttctgggggcactggtttactcgaattcggcggtgaatcccatactttatgccttcctaagtgagaacttccggaagagcttcttcaaggcctttacctgtatgaataagcaggatatcaacgctcaactccagctggagcccagtgttttcaccaaacagggcagtaaaaagaggggtggctccaagcgcctgttgaccagcaatccgcagattcctccactgctgccactgaatgcgggtaacaacaattcatcgaccaccacatcctcgaccacgacagcggaaaagaccggaaccacggggacacagaaatcatgcaattccaatggcaaagtgacagctccgccggagaatttgattatatgtttgagcgagcagcaggaggcattttgcaccaccgcgagaagaggatcgggcgcagtgcagcagacagatttgtaa

SEQ ID NO: 188 - protein, 451 aa, Drosophila melanogaster
  AAF49259
  GI:7293895
MTADSEANATNWYNTNESLYTTELNHRWISGSSTIQPEESLYGTDLPTYQHCIATRNSFADLFTVVLYGFVCIIGLFGNTLVIYVVLRFSKMQTVTNIYILNLAVADECFLIGIPFLLYTMRICSWRFGEFMCKAYMVSTSITSFTSSIFLLIMSADRYIAVCHPISSPRYRTLHIAKVVSAIAWSTSAVLMLPVILYASTVEQEDGINYSCNIMWPDAYKKHSGTTFILYTFFLGFATPLCFILSFYYLVIRKLRSVGPKPGTKSKEKRRAHRKVTRLVLTVALIHSNPAQRDLSRLEILIFLLLGALVYSNSAVNPILYAFLSENFRKSFFKAFTCMNKQDINAQLQLEPSVFTKQGSKKRGGSKRLLTSNPQIPPLLPLNAGNNNSSTTTSSTTTAEKTGTTGTQKSCNSNGKVTAPPENLIICLSEQQEAFCTTARRGSGAVQQTDL

SEQ ID NO: 189 - DNA, 23546 bp, Drosophila melanogaster
  Name: bt
  AE003843
  GI: 10726313
  Transcript: CT3598
gttaaagaggaggcaaagcctgcggctcccaaacttaaggccaaagcaaaagcaaaaccgaaatacgaagagctaccagaaattccggactatgaacgtccacagcttgaaaagtatgaaaaatccgattttacaccatccgactttgctcgtgatctggaaataccaaacaagatggaaaaacccataatagacagcggaaagaaagaacctgcggttcttgcacagaaaaatggaattcccaaaaagacggacattattgaacagtacgcagacgaacctaagggcttgaaagtcggcaaaggtaaacttcctgatgaaggagacggtcgagatggcgctgtgctcaaaccagtcatcattgaacccgagaaggaaatattggatctcggaaataaaaaaaataatcaggcaaatgcaacggagcagttctctcccacaaaagcagtcaaggcacaagtcgctgacttgaagaagcctgaaactttagcaacccttgaggataactatgagcggcccgttttagaaaaatatgatccttttagcattgataagaccaaatcagagaaatccacaccatccattatcaccccggacattagaggtcccgaagtaaagttgcctgtgcaagaaactaaggaggagaagcaaaaggtccctaaaatgcaaccacctgctccaggtgacccacccaagatcgaagtgattcgggagaagcgaccatcactggcaccagagcccccaagtcgccgcggatctcttataccccccgctgatactggtcgacgaccatctctgatcatcaatgatgagcggcgcagaccgtcgattgatgtacgccgcccaagcgtgcaagatctagaagatcttattaacaagccatccacacccttacgcgatgtcggcgatggcggtcctccttctatcgttgatgtccaagagtcttactctgttgtggaagactcgactgcttacctcactgttggcgtcgaaggtagtccagcacctacgttcaagttctacaagggagttagcgagattcttgagggcggtcggtttaagttcctcacagatgggcaaacaaacacaattacattgtgtatgcgtaagtgcaagcccaatgatgaaagcaagtacaagatagttgtttcgaacattcacggtgaggattcagccgaaatgcaactctatgtatctgattcaagtggtatggacttccgtgccatgctcaaaaaacgtcgttatcaaaaatgggacaaagacgaacaggaccccaattggggcgaccttaaagaaacagaaaaaccgttgccggcccttaaaaaagttgaaaggaaggttgagtcgttcctcagtccacttatcgatcaatttgcaaaagagggaaaggacaaaaaggttgtttttgaagccagattcagcaaacccaattgcaagcccaagtggctgtttcgaaaagacgaggtgtttaccggcagtaaatttaaatttaaacaagaaaatgatacttatcagttgattattacgacaccgaaagtcgaggacaccggcaagtacacgattgaaatcggcggtgtttcaagtacagcatttttgaatgtcgaagaagccgatcccacctacacttttacgaaaccccttaaaaagaaacttgagggattcactcagcatgagaccactcttgagtgctccgtcagcagcagcatggctaatgtgcattggtttaagaataacaccaaattggagtccgatgatcctcgctatcttatctccaaagatataaacggtaacctcaagcttattattaaggattctgtgctcgatgatgcggggctctacagatgtcaactggataagcaacctgataagactgagtgtaaccttaaggtcacagagtacccgtacaagttcgtcaaggttctgaaatcacaacagtgtattgagaaagacacagtgacgctcgcctgcgaaatcgatgatgctatgggtgaagtgcagtggttacgtaacggcgaagaaatcaagcccgataaacgtattcaaattgtaaaagatggtcgaaagcgaaagctagtcatcaaggactgcaaggttaccgatgccggccaattcaaatgtacaacgaatgccgacaccacagagtcggaaattattattaactatcaaaaccgatttaataaaaaactcaaggatactgaagctgttgagagagaaaaattgattctggacatcgagcttcaggatcaaacagcaccgtgtgactggaaatttaacggagagcccatagtaccgagtgaaagtattgaaatcaagaacatgggtggcggcaagcatcaactcatatttagcagcctggatatgtctaatgagggcgaaataacttgcgagtctggacagctaagttcgaaatgcaagctttctattcgcaagggagaaagtagaccaaacatagactgtcctgataaattttctggtcctatcagtgcccctgtgcttctagaagtgccatttaaagtttccggtacaaagcaaacaccagtagaggctaaactcttcaaggacggaaagccattgcccgtgaaggatgtggaggttgcagttaccgatgacaaggtcacatttaaaataaaaaagccgtcaagagatttatctgggccatatcaaataaaaatatccaatggacaaggtgaagataccaaagatgtacagattatttgtcaagatgttccacagccccctcaggatgtggacattacagacgtctatcaaacatcctgtgtagtaagcttcaatcccccgtctgacgatggtggtacacctataacgaaatatgtgatcgaacggcaggacttaagcaaaaaacatggttgggagtctgtcgctgaggttttacctagtgaaccgtgtctaaaaaaaattgatgacttaatcccaaaaaagcagtacagattccgcattcgtgctgtcaacgcaatcggccaatcagatccagccacattcaaaaataccattcttgcaaaagacccatgggatgagcctggaaaaccgaaggcagtcgatcttaccgactgggataaagaccatgcagatctgaagtgggaagcccccgagactgatggcggggatcctataactgcatatattgtagaatacaaagaaaagttctctaacgactgggtttccggcaaggaagttgacggcgatgctagaactgctaccgttgacggtctaaaagaggggcaacagtatgaattccgagtccgtgctgttaatagggcaggcccaggtgaacccagcgacaagactaaatccattattgcaaaatgccgttttgttaagcccttcattgttggagaaggtcttaaaaatgtaaccgttaaaaaggggcaaactattcggttcgacattaaatatgacggtgagccagagccagcagcaacatgggtaaagggaacagacaatttaaagtttgacaaccagcgcatttgcttagaccagttggaaaggaactcatccattactattaaaaaatccgtgcgcaaggacacaggcaaatacaaattagtactgtcgaacagctcagggacaatcgagtccgaggctcaagttgtggttcttgacaggccacttcctcctggtggaccatttgagccggaagagattcgcgccagccatataaaaatgaaatggaaacgtccagatgatgacggtggttgtgaaattagtggatatgcattagagcgcatggacgaagagacgggccgctggattccagctggagaagtgggtccgaatgagacttcattcgattttaagggactaaccccaaataagaaatacaagtttcgcgtcaaggctattaataaagagggcgagtcagagccacttgagacattcgacgcaatcgtggcaagaaatccatacgatcctccaagtcctcccagccagccagttatcgatgattacgataacaagagtgtccttttaaaatggaagcgtcctccgtcagatggcggacgcccaattacccattatatcgttgaaataaaagacaaattcgcaccttcctggagtgaggtggcaaagaccgatgatcccaaccctgagtgcaacgtagagggtcttaaagaaaaaatggtgtaccaattccgagttagagccgttaacaaagcaggcccctccgagccttcccaaccaactgacaatcacttgtgcaaacacaaaaatcttaagccgcaaatcgatcggtctacttttaaacgagtaacaataaagagcggccgaactcacaaatggtcggttgatgtccttggggaaccaataccagagctgcattggagctggagggatgatatcccattaaccaacggagacagaataaagatagaaaatgtcgactatcatactgattttagcattacaaatgttttgcgtaaggatagtggcttttatacattaaaagcagagaaccgcaatggcattgaccgagagaccgttgaattagttgttctaggaaagccaagctcgccaaaaggaccccttgctgtaagcgatgtaactgcaagtggatgcaaacttcaatggaagaagcctgaagatgacggtggagtgccaataaaggaatacgttgttgaaaaaatggacacagcaactggaaaatgggtccgagttggaagatctcctggtgaaaaagagccccctagctttgacgttactggcttaagtctgggatcagagtacatgttccgtgtatctgctgttaacgaggaaggagagtcggaacctcttactactttggtaggggtcgtggctaaagatccatttgatgagccaaataaaccaggaactccagaagttactgattatgataatcaaagtataagcttaaaatgggctgcacctaataatgacggaggagccccaattcaaaagtacataatagaaaaaaagaataaaaataagacagaatgggaaaaagctctagaaataccgggagaccaactggaagccacagttgccggacttcaggaatatggagaatatcaatttcgagtaatagcagtaaacaaagccggactttcgcccccatcagatgctagtgttccccaaatagtgaagtacaaaaaattgaagccccgtattgaccgatcaaacttaaagccgttgctcattcgagccggcaagccaataaggtacgatgttaatgttcgtggtgaacctgcacccgtaataacgtggtatcaaaatgataaagagctcaagccagaagaacttcctagcagtagcgaaatcaagaacatcccatataatacaaagatttcaatcattgaaactgttcgtaagcatactggaatatacaagataatagctgttaacgaacacgggcaggatgaagccacagttgaggttaatattctagctcctccaagcaaaccaaggggtcccttggatgttaaagatgttactaaagacagctgtaagctcaaatggaaaaaaccagaagatgatggaggaaaacctatttcagcatatcaggttgaaaagtttgataaaaaacaaggtcgttgggtccctcttggtcgaacgtctgccaatgataccgaatttgatgtaaagggcctccaggaaggccatgagtatcagtttcgcgtcaaggcaattaatgaagagggggaatccgatcccctggactccgatgatagcatcatagctaaaaatccctatgatgctgctagtaagccaggtacacctaacattgtggattataatgagcatatggtaaaattgaagtgggaagcacccaggtctgacgggggcgccccaatatcaggttacatcattgaaaaaaaagataagttctctcctatttgggatgaaatcctcagcaccaatacatccgttcccgaagcaaccgttgaaggtcttgttgaaggcaatatctaccagtttcgtgttcgggcagttaataaggccggtttcagcgatccaagtgatgcaacagagcctcatttggccaagccaagaaatctaaagccatacataaacagagacaaaatgaagcctattaaggttcgcgctggtcaacccgttaaatttgatgtcgatgtcaagggagaaccggcgccttctttaacatggttcctaaaagaaaccgagttaacgtctacgggtcaagtacgtctagaaaacatagattacaataccaaacttacattgcttgatacggatcgcaagcaaagtggccagtataagttacgtgctgaaaatataaatggtgttgacgaagctgtagttgaagtcattatattagataagccttcaaaacctgaaggaccgattgaagtctccgacattcataaagaggggtgcaagcttaaatggaggaaacctaaagatgatggaggtatacctattactggctatgtaatagaaaaaatggataccgccactggtaaatgggttcctgctggttccgtagatccagaaaaatatgatattgagataaagggcttggatccaaatcatcgctaccaatttagagtgaaggctgtcaacgaggagggtgaatcagaacctcttgaaactgaatcggctattactgccaagaatccattcgacgtgtctgctccccctggtctcccagagcttgaagattgggatgagcatcatgtcaaactaaaatgggaaccacccattcgggatgggggctctcctattaccaattatataatcgaagtaatggataaagattcaggggaatttgtaaaggcagttgaaactgatagtccagtttgtaagggcgtcgtaaagaaacttgaagaaggacagcaatacaaatttagagttcgagccgtaaacaaggctggtccatcggacccatctgaacaaacgaattggcatgtggccaagcctcgattcctgaaacctcatattgatcgagtcaatttaaaacccgtgattgtaaaaactggtttatcaattagcttggatattaacataagaggagagccagctccgaaagttgaatggttcttcaataattcatctgttacaagcgacgaacatagtgtaaaaattgataatgttgattacaatacgaaattctttgttatgcgtgcacagagatctcaaagtgggaaatacattatcaaagcaacaaacgaagttggtgaagacgaagcagaactggaagtcacagttttgggcaagccaggaaaaccaaaaggtcccctgcaagtcaatgacataacaaaacacagttgcaagcttaagtgggaaaagccagatgatgatggtggttcacccatcgactactatgaaattgaaaaacttgatcctcacacgggtcagtggttaccatgtggaaaaagtaccgagccggaggccaaggtaattggtcttcatgaaggaaaggcatataaattccgagtaagggctgtaaacaaggaaggagaatctgaggacttggaaaccgaaaaaccaattatagcgaaaaatccatatgatgaaccagatagaccagggaagcctgaaccaactaattgggataaagatttcgtcgacttagcctgggatccgccgaaaaacgatggtggtgcaccaattcaaaaatatgttattcaaatgcgagataagtctggacgcgcatgggtggactctgcaaccgtgcctggggataagtgtaatggtaccgtaactggcgtagaagagggccatgaatacgagttccgtattgttgctgttaataaggcgggacctagtgatccaagcgatgtttcaaaatcagtgatagcgaaacctcgttttcttaaacctcacattgaccgcaagaacctacaaaagaaaattatgcgcagcggtcaaatgcttcatattgacgctttaataaaggcggaacctccagctaaagtaacatggacctacaataaaacagaaattaaaacttcagatcacataaaaattgaaaacgaggactataaaacgacattcattatgccgaaagtgaaacgcgctgatcgaggcatttacatcgtcactgccaaaaacgactcaggttccgacaccgtagaagttgagctggaagtactgtgcaagccaagtaaaccgaaagggcctctagctgtttctaacgtaacagccgaaaccttacacctaaaatgggaaaagcccgaagatgatggcggtgaccctattgaacaatatttagtcgaacgcatggatacggaaacaggtcgatgggtacctgtacttacaactaaaacaccggaagccgatgttacaggtcttacggaaggaaaggaatatctgtttagagtaaaagcagtcaattccgaaggcgaatcagagcctttggtgaccgatattccaacaaaggccaaaaatcctttcgatgcggccgacaccccaggtaagccgcaaattgttgattggtcaggtaaccactgtgatctaaagtggagggcacccgaagacgatgggggggcatccatcactggctatattgtagaaagaaaggatcccaatacaggaaagtggcaaaaggcacttgaaacaagtacacctgactgtaaggcacgcgtaaatgacttaatcgcaggaaacaaatatcagttcagaataatggctgtcaacaaggcaggaaagagcaagccatccgagccgtccgaccagatgaccgcaaaggaccgatttgctccacccaaaattgatagaacaaacattaaggacataaccatcaaggctggacaacacattcgtttcgacattaaggtctctggagagcccccggctacaaaagtttggcttcacaacaaagcccgacttgaaaatgacgatagtaactacaatattgatatggaatcatatcgcacaaaactgaccgtgccaatttcaaagcgattccattcaggaaaatatactcttaaggcagagaatgaatctggacgggatgaggcttcatttgaagtcatagtcttagacaaaccgggccccccagagggtcccttacgagtcacagatgtgcacaaagaagggtgcaagctgaaatggaacgctcccttggacgatggaggtttgccaatcgaccattacattattgagaaaatggacgttgagagtgggcgttggttgccatctggtcgctttaaggaatctttcgcagagttgaataatttggagcctagtcatgagtacaaattccgagtgcttgccgtaaatactgaaggtgaatctgaaccattaactggagaacagtctgttattgccaagaatccttttgatgagcccggaaagcccggaactccggaagcagtggactgggataaagatcatgtcgatttggtttggaggccaccaattaacgatggtggatcgcctatcactggctatgtagttgaaaaacgtgagaaaggtactgacaagtggataaagggaacagaaattactatcccgtgccttggcgaagagtgcaaagctactgtgccaaccctaaatgaaaattgtgaatacgaattccgagtcaaagcaattaatgctgctgggcctggtgaaccatctgacgcaagcaagcctatcattacaaagccaagaaagttggcccccaaaattgaccgcaaaaatattcgtacctataacttcaagtctggagagccgatatttttggacatcaatattagtggagagcccgcaccggatgttacttggaatcaaaacaacaagtctgttcaaaccacatcatttagtcatattgagaaccttccgtataacaccaaatacataaataacaaccccgaacggaaagatacgggactctacaagatctcagctcataacttttacgggcaggatcaagtcgagtttcaaattaatattattacgaaaccaggcaagcctgaaggtccattagaagtatcagaagtacacaaggatggttgtaagctgaaatggaaaaaacccaaggacgatggaggtgaacctgttgaaagctatttggttgagaaattcgacccagatacgggtatttggttacctgttggcaggtctgacggacctgagtacaacgttgatggcttagtcccaggtcatgattacaagttccgggtaaaagctgtaaacaaggaaggggaatcggagccactggaaacgttgggttcaataattgccaaggatccatttagcgttccaacaaagcctggagttccagaacctaccgattggactgcaaataaggtagaacttgcttggccagaaccagcaagtgatggtggatctccgatacaaggctatatagttgaggtaaaagacaaatacagccctctttgggaaaaggctttggaaaccaattccccaactccaactgcaacggttcaaggtctcattgaaggaaatgaataccagttccgagtagttgccttgaataagggtggcctatcggagccttcagacccaagcaaaatatttacagctaagccgcgctatcttgcccccaagatagaccgtagaaatctacgtaatattactctgtcgtccggaaccgctctgaaattagatgcaaatataacaggtgaacccgctccaaaagtagagtggaaactttccaattaccatttgcaatcagggaaaaatgttacaatcgaaactcctgactactatacaaaattagttattagaccaacgcagcgaagtgattctggagaatatttggtcacggcgactaacacttctggaaaagatagtgtgcttgtaaatgtagttatcacagataaaccctcacctcctaacggaccacttcaaatatcagatgtgcataaagagggttgccaccttaaatggaaacgtccgagcgatgatgggggaacgccaattgagtatttccaaattgacaaattagagcccgaaactggttgctggattccttcttgtcgatctacagaaccccaagttgatgttacaggtctttctccgggaaatgaatataagttccgagtatcagctgtgaatgccgaaggtgaatcacagcccttggtaggcgatgaatctatagttgcaagaaatcctttcgatgaacctggtaagcccgagaaccttaaagcaactgattgggataaggatcacgtggacttggcgtggaccccacctctaattgatggcggatcaccaatttcttgctatattatcgaaaagcaggataaatatggaaagtgggagcgggcccttgacgtccctgctgatcaatgcaaagcgactattccagatcttgttgagggccaaacctacaaattccgagtttccgcggtcaacgcagctgggactggagagccatctgattctactccgccaataattgcgaaggctcgcaataaaccacccattatagatagatccagcctagtagaagtgcgtattaaagctggacagtcctttacatttgattgtaaggtatctggggagccagcgcctcagacaaaatggctacttaagaaaaaggaagtttattcaaaggacaacgttaaggtaactaatgttgactacaataccaaactaaaagtaaatagtgcaaccagatctgattccggtatatacacagtgtttgcagaaaacgcaaacggagaagacagtgcagatgttaaggtaactgtcattgacaaacctgcaccgccaaacggaccgcttaaggttgatgaaataaattccgagtcttgtactctgcactggaatccaccagacgacgatggaggacaaccaatagataattatgtcgttgaaaaattagatgaaacaacaggacgttggatacctgccggggaaactgacgggccagtcaccgcacttaaagtcggtggccttacccctggccataaatacaaattccgagtacgtgccaaaaatcgtcagggaacttcagaaccacttacaacagcacaagccattattgcgaaaaatccattcgatgtacctacaaaaccaggaacaccaaccataaaagactttgacaaagaatttgttgatctggaatggactagaccagaggctgatggtggatctccaataaccgggtatgtagttgagaagcgggacaaattttctcctgattgggaaaaatgcgctgaaatcagtgatgacatcaccaatgctcacgttcctgacttgattgaaggccttaaatatgaattccgtgtcagagcagtaaacaaagccggtccaggctcaccaagtgatgcaactgaaacacatgtggctcgccccaaaaacacacccccaaaaatagatcgaaacttcatgtccgatattaaaattaaagctggaaatgtatttgaatttgatgtaccagtaactggggagcctttgccaagcaaagattggacccacgaaggcaatatgatcataaacacagaccgagtaaaaatttccaattttgatgaccgcactaagataagaatacttgatgcgaagcgatccgacacaggcgtctatacattaacagcacgtaacataaacggtacagataggcacaatgtaaaagtaacaatcctggatgctccaagtgtgccggaaggcccattacgtaatggcgatgttagcaaaaactctatagtacttcgatggaggccacccaaggatgatggtggctcggagattactcattatgttgtggaaaaaatggataatgaggccatgcgctgggttcccgttggtgattgcactgatactgaaatcagagcggacaatctaattgaaaatcatgattatagttttagggtaagggctgttaataagcaaggacaatcacaaccactcacaacttctcagcctataacagcaaaagatccttattcacatccagataagcctggccaaccgcaagctacagattggggtaaacattttgtggacttggagtggtccactccaaagagagatggaggagcacccatttcttcgtatattatagaaaaaagaccaaagtttggtcaatgggaacgagctgctgttgtgctaggtgataattgtaaggctcatgtaccggaacttacaaatggtggagaatacgagtttcgggtgatcgccgtcaatcggggaggtcctagcgatccatctgatccgtctagcaccattatatgcaagccacgtttccttgctccattctttgacaagtcacttctaaacgacatcacggtccatgctggaaagcgattagggtggacattaccaatcgaggcgtctccaagaccattaatcacttggctatataatggaaaagaaatcggttcaaattcacgaggcgagtccggtcttttccaaaacgaactaacatttgaaattgtatcctcacttagaagcgacgaaggtcgttatactttaatattaaagaatgagcatggatcatttgatgcgtctgctcatgcaactgtattagatcgaccatcgccacccaaaggtcctctggatataacaaagataacaagggatggctgccacctaacctggaatgttccggatgatgacggtggttcgcctatattgcattatattatcgaaaaaatggatttatctcgaagcacatggtccgatgctggcatgagcacacatatagtccacgatgtcactcgtcttgtccaccgcaaggagtacttgttccgtgttaaagcagtcaatgcaattggggaatccgatcccttagaagcagtaaatactataattgctaaaaacgaatttgacgagcctgatgcgcctggaaaaccaattattactgattgggatcgtgaccatatagacttgcaatgggctgtcccaaaaagtgacgggggagctccaattagtgaatacatcatacagaaaaaggaaaagggcagcccttactggactaatgtacgacatgttccatcaaataagaacacaaccacaattccagaactaactgagggtcaagagtatgaatttagagttattgctgttaatcaagcaggccaatctgaaccttcagagccgtctgatatgattatggcaaagccgcgctacctgccaccaaaaataataactccactaaatgaagtgcgcattaaatgcgggctcatatttcacacagatatacattttatcggtgagccagcaccagaagcgacgtggacacttaatagcaatccactattgtcgaatgacagatcaacaattacatcaatcggtcaccactctgtagtacatactgttaactgtcaaaggtctgactccggaatctaccacctattacttcgtaatagttctggaatcgatgaaggcagcttcgaacttgtagtactcgaccgcccggggccgccagagggtccaatggaatatgaagaaataactgcgaactctgtgactatatcatggaaaccaccaaaagataatggaggatctgaaatatcttcttatgttatagaaaagcgtgatcttacccatggcggtgggtgggtaccagcagtaaattatgtaagtgcaaaatacaaccatgccgtggttcccagactgctggaaggaacaatgtacgagcttagagttatggccgaaaacctacaagggcgctccgatccacttacttccgaccaaccggttgttgcaaaatctcagtacacggtgccaggagctcctggaaagccagaactaactgatagcgacaagaatcatattacaattaaatggaagcaaccaattagtaatggaggatcccccattattggttacgacattgaacgtcgcgacgtaaacacaggacgatggataaagataaatggacaaccagtacctactgctgaatatcaagacgacagagtaacatcgaaccatcaatatcaatacagaatatcggcggttaatgctgccggcaacgggaagacttccgaaccttcggccatattcaatgctcgaccactgcgtgaaaagccaagattttattttgatggcttaataggaaagcgcattaaagttcgtgcaggtgaaccagtaaatttaaatattcccatatctggggcacctactccgacaattgaatggaagcgaggggatctcaaattagaggaaggcaagcgaatatcttatgagactaactcggagcgtactctatttcgcattgatgattcaaacagacgggactctggaaaatacactgttaccgctgctaatgagtttggtaaggataccgctgacattgaagttattgtcgtagataagccatcgccacctgaaggacctttgagttatacggagacagcaccagatcacatttctttgcattggtattcccccaaggacgatggtggcagcgacattacggggtacataatcgagttcactgagtttggtgtagatgattggaagccagtgccaggcacttgtcccaacaccaactttacagtaaagaatctagtagagggaaaaaaatatgtttttcgtattagagctgaaaatatctacggagcttccgaagctctcgagggtaagccggtgttggctaagtcgccttttgatccacccggtgcaccatctcagccaacaatttctgcatatacaccaaactctgctaatttggagtggcatcctccagacgattgtggtggtaagcctattacggggtacatcgtagagcgacgcgaacgcgggggtgagtggattaagtgcaacaattacccaacaccgaatacatcctatacagtatccaatcttcgggatggagctcgttatgagttccgggtcctcgcagtaaatgaggctgggcctggccacccgtcaaagccttctgatccaatgactgctgaacatcagcgctatcgtccagatccgccggagccaccaaaaccggatcgtattactaggaatggtgtcacattatcttggcgtccgcctcggacggatggcaagtccagaataaaagggtattatgtcgaaatgcgtcccaaaaacgggaaggattggaaaactgttaacgatatacctattaattccactgtatacacagtaccaagtcttaaggaaggagaagagtactcattccgtgttgttgctgaaaacgaagttggtcgttcagatccatctaagccatcgcagcccattacaattgaggagcaaccaaataagccttgcatggaactcggaaaggtccgagatatagtgtgtagggctggtgatgattttagcattcacgtaccctacctagctttccccaagcccaacgcattttggtattctaatgacaatatgctggatgacaataaccgtgtgcacaaacatttgactgatgatgcagcatctgttgtggtaaaaaactcgaaacgtgcagactcaggtcaatatagactccaattaaagaatacgtcaggattcgatacggccaccattaatgttagggttctggatagaccatctccaccgacacgcctacgtgctgatgagttttctggagattctctaacattgtattggaatccaccaaacgatgacggtggttccgctattcaaaattatattattgaaaaaaaagaagctcgttcgtccacatggtctaaggtcagcagcttttgcacagttccttttgttagaattcgaaaccttgtactcaataaagagtacgatttccgtgtgatagctgaaaataaatatggtcaatccgatccggccaatacatctgagcctatacttgcaagacatccctttgatatccccaatactcccggtattccccatggtattgactcgacagaagatagtataacaatagcatggacgaagcctaaacatgatggtggatctcccataactggatatattattgaaaaacgattattgagtgatgacaaatggaccaaggcagttcatgcactttgtccagacctttcttgtaaaattccaaatcttattgaaaatgctgaatacgaatttagggtggccgcagtaaatgcagccggacagtcggcctatagcggttccagcgatctcatcttttgccgccgaccacctcatgcgccaaagattacttcagatttgtcaattcgggatatgacagtaattgcaggagatgaattccgtataacagtaccttatcacgccagtcctcgcccaactgcatcatggagtttaaatggcttagaagtaattcccggcgagcgtattaaatttgattctaacgattatgcttcaatgtattacaacaaatcagctaaacgagatgaaactggatcgtacaccattacacttaccaataacaaaggttcagatactgcttcatgtcacgtcacggtggtagataggccattaccacctcagggtccattgaatgcctacgacattacccccgacacttgcaccttggcctggaagacgcctttggatgatggaggttcaccgattacaaattatgtcgttgaaaaattagataacagtggttcatgggtaaagattagcagttttgttcgtaacactcactacgatgtcatgggcctggaacctcactacaaatataacttccgcgtaagagcagaaaaccaatatggtttgtctgatcctttggatattattgaacctattgttgccaaacatcaatttacagtcccagatgagcctggtcagccaaaggttattgactgggactctggaaatgtaactttgatttggacccgaccattaagtgatggagggtcccgcatacaaggctatcaaattgaatatcgggatattttaaacgattcgtcttggaatgcgtatgactacattataaaggacactaagtatcaactttacaacttaattaacggcagtgaatacgaattccgtataaaggccaagaacgctgcaggcttaagtaagccatcttcaccatcacttagatttaagctgaaaggaaaattcaccgtgccatcacctcctggagccccacaagtaaccagagtcggcaaaaactatgtcgacctaaagtgggagaaacccttaagagatggtggctcccgcattacgggttacattattgaaagaagggacatcggtggagccgtatgggtaaagtgtaatgattacaatgttttggatactgaatacaccgttatgaacctcatcgagatgggtgattacgaatttcgagtatttgctgtcaattccgctggacgttcagaaccaagcttatgtactatgccaatcaaggtttgcgaggtactaggtggaaagaagcctgattggattacacgactgcaagacaaggtagcaccctttggcaaggattatactttacaatgcgccgcctcgggtaagccaagtccaaccgcaaggtggcttcgcaatggaaaagaaattcaaatgaatgggggccgaatgacatgcgacagtaaagatggggtcttccgactgcacatatctaacgtgcaaactggagacgatggtgactacacatgtgaggcaatgaattctctcggatttgttaacacatcaggttatctaaaaattggatcaccaccaattattaacaggtgcccaagcgaactaaaattaccagaaggagacaattcgaagatcaagattttctactctggcgaccagccactaactgtgatattaaagaaaaataatgaagtcatatgtgacagtaatgatgatacgcatgttaaggtaaacatatttgacgactatgtagcgatttacattcgtaatatcgtaaaaagtgatggtggtccatatcaaatagaattcacgaatgaatctggtagtgccacaggggagttttatgtacacatcactggcatgccttcagcacccactggacctatgggtatctcttacattaacaaaaactcctgtatgttaaactggcgtcccccttcttacgatggtggtcttaaagttagtcactacgtcatcgagagaaaagatgtgtcatctccacactggataactgtttctagtacctgcaaagataccgccttcaatgtacaaggtcttattgaaaaccaagaatacattttccgagtgatggctgtaaatgagaacggaatgggtccaccactagaggggttaaatccaattcgagctaaagacccaattgacccaccatcgccaccgggcagtcctcaaatcactgagatcggaggagactttgtgcatttggaatgggaaaaaccggaatcggatggcggtgctcacattcaaggctattggatcgataagcgtgaagtaggcagcaacacatggcagcgtgtaaacgctaccatctgtgctgccaatcaaataaactgtatcaatctcattgaaggtcgacagtacgagtttcgaatttttgctcagaatgtagcaggcctttcaacagaatcgtccgcttcacaagcagtcaagataatagatccacaggcggcttcgcctccattgattgtgaaaccgctacgcgatgccaattgcattcaaaaccacaatgcccaattcacatgcaccataaatggcgttcctaaaccaacgatatcttggtataaaggagctcgcgaaattagtaatggcgcccggtatcacatgtactcagaaggtgacaatcacttcctaaatattaatgacgtattcggcgaagacgctgatgaatatgtttgtcgcgctgtaaacaaggctggagcaaaatcaacacgcgccactctggccattatgactgctccaaaattaaacgttcctccaagatttagagacactgcttacttcgataagggtgaaaatgttgtaatcaaaattcccttcactggcttcccaaaaccacgtatacactgggttagggacggtgagaatattgaatccggtggtcattacactgttgaggttaaagaaagacatgccgttcttatcattcgtgatggatcgcacttggactcgggaccttataggataacagcggagaatgaacttggttcggatacagctataatacaagtgcaaattagtgatcgtccagatcccccacgattccctttaatagaaagtattggcacagagtcattgtctcttagttggaaagcacctgtatgggacggttgcagcgacataacgaattactacgtagagcggcgggagcacccattatcttcgtggatacgagtcggaaatactaggtttacgtctatggcagtcagcggcttgactccaggaaaggagtacgatttccgcatatttgctgataatgtatatggacggtctgatgcttcagacacaagtactctaatcaagactaaggagtctgttaaaaagaaaccaattgaacgtaaatgggaaattgatgcaaatggacgaaaactgcgcggaaaagcagatggaccagttaaagactacgattcatatgtgtttgatatttactccaagttcgttccgcaacccgtggaaatatcccagcaaagtgtatatgataggtatgatatccttgaggaaatcggaacaggggcatttggagtagtacatcgctgtcgtgagagaagcacaggaaatatttttgctgccaagttcattccagtatcacactcagttgagaaagacttgatacgtcgtgaaatagatataatgaatcaactgcatcatcagaagcttatcaacttacacgatgctttcgaagacgacgatgaaatgatcctaatactggaatttttatctggtggtgaattatttgaacgcattactgctgaaggttacgtaatgacggaagctgaagttataaactatatgaggcaaatttgcgagggcatcagacacatgcacgaacaaaatattatccatttggacataaaaccagagaatataatgtgtcaaactcgttctagcacaaatgttaaacttatcgactttggactagcgacgcgcctcgatccaaatgaagttgttaaaataacaacaggcacggctgagttcgctgcaccagagatcgtcaacagagagccagtcggcttttacactgatatgtgggctactggagtactctcctatgttctgttaagcggattatcgccctttgctggtgataatgatgttcaaactctcaaaaacgtaaaggcttgcgattgggacttcgacgtagaatcctttaaatacatttctgaagaagctaaagattttataagaaaattgctcgttagaaacaaagaaaagcgtatgacggctcacgaatgtcttctgcatccttggctgactggagaccatagtgctatgaaacaggaaatcaaccgtgatcgttatctagcctatcgagaaaaattgagaagaaaatatgaagacttcgagaggttcctgctgccgattggccggctttctgaatactcatccttaagaaaattgctgatggagaaatataagatccatgatgctgttttcgataggcgtcaagcagcgccacgttttgtaattcgaccatcttcacaattttgctatgagggccaaagcgtaaagttctactgcagatgcattgcaatagccacacctactctcacttggtcacataataatatcgagttgcgacagagtgtcaagtttatgaaacgatacgttggagatgattactacttcatcattaaccgagttaagttggacgatcgaggagaatatattatacgcgcagaaaatcactatggctctagagaagaagtcgttttcctaaatgttcagcccttaccaaaagaacagccgaggtaccgaacggaatcaactccggtgcgcagacgtgaacccttgccgtacacattctggcaggaagagtcagagacggcgcccagtttcacattccttttgcggccacgcgtcatgcaagcccgcgatacatgcaaactactgtgttgcttaagtggcaagccagtacctaatgtaaggtggtacaaggacggccgagaacttagcaaatacgagtatgcgatgactcactcagatggagttgtcaccatggaaataattgactgcaagccatccgattcaggaaaatacagctgtaaggcaacaaactgtcacggaacagacgaaacagattgtgttgtgattgttgaaggagaatgggttacgcctgagcaggctcaactcgcccacaattttctttactcaggagataggaaatacatagagcagccaattaagccagctcccctcccaatagtgacatcccggcagtatacatcatcttcagtccaaaacacatctgaaccacagggtgacaaagtaaatgtgtccaactcaaactcatcaggcatttcaaacaagaagaagtatgcatcaaatagtttacaggccccaggaagcccgtcaagatcacgaagcgctaccaaagagcttatacttccaccagatgattcattaatgtgcaaaccggaatttacgaagccccttcacgatttaacaattcacgatggagaacagttaatattaacttgctatgtaaaaggagatccagagcctcaaatctcttggtcgaaaaatggaaagtccctatcatcttctgatattttggacttaaggtataaaaatggtattgcaactttaaccatcaacgaagtgtttcctgaagacgagggagttatcacttgcacggccacaaattctgttggagccgtggaaactaaatgcaaactaacaatacagcccctggataaaaacataaacaagcgaaaagtaaatgccggcgacaacgcgccgaaaatagttagccacttggagtccagatttgttagggatggcgatgcagtgaatctggcttgtcgcataattggagctcaacatttcgatgtcgtatggctgcataataacaaagagataaagccgagcaaggatttccaatacaccaacgaggccaatatatatcgattacaaattgcagagatatttcccgaagatggcggcacctacacttgcgaggccttcaatgatataggcgaatcattcagtacctgcacaataaatgtaacagtgccaggagacgagactaagcagccttcctttgtaaagtttcccacgtcagtttctgtacttgagggagagggtaccacatttgaatgcgaaatagattctgagctcctaaatttggtttggctgaaagatgggaaacccattgacgaaactcttccacgttactcatttacaaaggatggccatcgatactcttttgcagtggcaaaatgtaatatggacgatgtcggtcaataccaagctaaagcggtatctgggaaggccgaaagtatttgtgcgttctcgatgaacgttcacacagcggaatccgcaaatccttggcaattattgtccataacttcaaatttcaaaagagcttgtgcgagatttttcccgcagcgacgttaaattttatgatcagaaaacaaagtcaatggttgtttgtgttctttggctgtatagataatacatgggggccttcctgtagaaaggacctggaaactttaacagacatcagtctgcgagtgctcttccgagggtggttagagacccacacggacaatgggggtaaactgttcactctgagcgcggatccaccaagcttggtcgcatataaggcctatttgtatgacggggatcgctgctga

SEQ ID NO: 190 - protein, 8943 aa, Drosophila melanogaster
  AAF59316
  GI:10726323
MGVAEDFAPSFVKKPQLHQEDDGNRLIFECQLLSSPKPDIEWFRSDNKVVEDVRTKFKIQPVGENKYTVVLELDDVVETDAGLYKVKAKNKSGEVSASINLNFTPADEPKEKQIDGFAPTFAKKPAIRQEEDGKRLLFECRVNADPIPAIIWFHNGAAVKESERHKITVDKDVHSYFATLEILNVTVEDAGKYKVNAKNELGESNATISLNFDNLVIGAYSHFQIALYGYFNSIGDEAPVPESAEGIKPTFTERPVIRQSEDGGNVTFECRCVGDPTPTVTWSHGETELNESNRYKMSLTMDQKLYHIACLEISSVVSSDQGEYRAQAKNKHGSGVATINLNFESGSKKIPDGKSPRFPKKPTIRQEEDLLIMECVLEAHPVPDIVWYCSEKEICNNQRTKMTRKAITKDSYILTLEIQNPTKEDGGNYRCNAINMYGESNANIALNFQGASDANGFAPSFIEKPRIIPNESGTLITMKCKCKAKPEPTVTWYRGQDLVEKSKKIKINTTVIAEDTYELTLEIKDPGATDGGTYRCNVKNEYGESNANLNLNIEAEPEPEGEGPTFIEKPRIVSENNGKLVIMECKVKADPKPDVIWFRNGEVIKESNKIKTFIEQRGDQYYIKLELLDPQLEDSGLYKCNIKNTLGELNANLTLNIEIVPVIKDKPKIIKIIKKRTVVIECTVASKFEPKCTWYKETSTVKESKRHVYQVEQTKEGEFAVKLEINDVEESDKGAYKLVASNEKGEAVSQIVNLVDIPEEERKPCKPEISRKLADQKVAESKTFELLVSLSQTDRKCKVEWYKGSTVIRETKDITTTFDGTTARLTFSSARTEHTSNYKVIVTNEVGKDESSCKITVEKVAKKKEEKPKEKEKTKNEKEVEQKEMEEDKNESGQSVAQTEGRINIEQISEGDPKEELTVKEEILDKRDTQEVKESSVELQDSAGHEVPEPKKATSDSKLDQSNQKNLDKKHKTDQSESKTNKNVSLAEPIKSNKQESEEQQATEQIGLKKVDRKASIVSVKEEISSDVRRKSTIKAKEEITVDDKKASSRRSSLAVEESNTESRRSSIIDKKPLEQVDNKPIDANKNPQPLKEEIPRLKPAEKRRTSKVIEEPKPDEGLPKLRKASIAQVKEEAKPAAPKLKAKAKAKPKYEELPEIPDYERPQLEKYEKSDFTPSDFARDLEIPNKMEKPIIDSGKKEPAVLAQKNGIPKKTDIIEQYADEPKGLKVGKGKLPDEGDGRDGAVLKPVIIEPEKEILDLGNKKNNQHADKPTVLDIIKQRRRSSIRNLMTKEPIQNESFLGVVLKPVIKDTREQAAPQQAIQLTKANATEQFSPTKAVKAQVADLKKPETLATLEDNYERPVLEKYDPFSIDKTKSEKSTPSIITPDIRGPEVKLPVQETKEEKQKVPKMQPPAPGDPPKIEVIREKRPSLAPEPPSRRGSLIPPADTGRRPSLIINDEKKLRPGEVMDTRRRRPSIDVRRPSVQDLEDLINKPSTPLRDVGDGGPPSIVDVQESYSVVEDSTAYLTVGVEGSPAPTFKFYKGVSEILEGGRFKFLTDGQTNTITLCMRKCKPNDESKYKIVVSNIHGEDSAEMQLYVSDSSGMDFRAMLKKRRYQKWDKDEQDPNWGDLKETEKPLPALKKVERKVESFLSPLIDQFAKEGKDKKVVFEARFSKPNCKPKWLFRKDEVFTGSKFKFKQENDTYQLIITTPKVEDTGKYTIEIGGVSSTAFLNVEEADPTYTFTKPLKKKLEGFTQHETTLECSVSSSMANVHWFKNNTKLESDDPRYLISKDINGNLKLIIKDSVLDDAGLYRCQLDKQPDKTECNLKVTEYPYKFVKVLKSQQCIEKDTVTLACEIDDAMGEVQWLRNGEEIKPDKRIQIVKDGRKRKLVIKDCKVTDAGQFKCTTNADTTESEIIINYQNRFNKKLKDTEAVEREKLILDIELQDQTAPCDWKFNGEPIVPSESIEIKNMGGGKHQLIFSSLDMSNEGEITCESGQLSSKCKLSIRKGESRPNIDCPDKFSGPISAPVLLEVPFKVSGTKQTPVEAKLFKDGKPLPVKDVEVAVTDDKVTFKIKKPSRDLSGPYQIKISNGQGEDTKDVQIICQDVPQPPQDVDITDVYQTSCVVSFNPPSDDGGTPITKYVIERQDLSKKHGWESVAEVLPSEPCLKKIDDLIPKKQYRFRIRAVNAIGQSDPATFKNTILAKDPWDEPGKPKAVDLTDWDKDHADLKWEAPETDGGDPITAYIVEYKEKFSNDWVSGKEVDGDARTATVDGLKEGQQYEFRVRAVNRAGPGEPSDKTKSIIAKCRFVKPFIVGEGLKNVTVKKGQTIRFDIKYDGEPEPAATWVKGTDNLKFDNQRICLDQLERNSSITIKKSVRKDTGKYKLVLSNSSGTIESEAQVVVLDRPLPPGGPFEPEEIRASHIKMKWKRPDDDGGCEISGYALERMDEETGRWIPAGEVGPNETSFDFKGLTPNKKYKFRVKAINKEGESEPLETFDAIVARNPYDPPSPPSQPVIDDYDNKSVLLKWKRPPSDGGRPITHYIVEIKDKFAPSWSEVAKTDDPNPECNVEGLKEKMVYQFRVRAVNKAGPSEPSQPTDNHLCKHKNLKPQIDRSTFKRVTIKSGRTHKWSVDVLGEPIPELHWSWRDDIPLTNGDRIKIENVDYHTDFSITNVLRKDSGFYTLKAENRNGIDRETVELVVLGKPSSPKGPLAVSDVTASGCKLQWKKPEDDGGVPIKEYVVEKMDTATGKWVRVGRSPGEKEPPSFDVTGLSLGSEYMFRVSAVNEEGESEPLTTLVGVVAKDPFDEPNKPGTPEVTDYDNQSISLKWAAPNNDGGAPIQKYIIEKKNKNKTEWEKALEIPGDQLEATVAGLQEYGEYQFRVIAVNKAGLSPPSDASVPQIVKYKKLKPRIDRSNLKPLLIRAGKPIRYDVNVRGEPAPVITWYQNDKELKPEELPSSSEIKNIPYNTKISIIETVRKHTGIYKIIAVNEHGQDEATVEVNILAPPSKPRGPLDVKDVTKDSCKLKWKKPEDDGGKPISAYQVEKFDKKQGRWVPLGRTSANDTEFDVKGLQEGHEYQFRVKAINEEGESDPLDSDDSIIAKNPYDAASKPGTPNIVDYNEHMVKLKWEAPRSDGGAPISGYIIEKKDKFSPIWDEILSTNTSVPEATVEGLVEGNIYQFRVRAVNKAGFSDPSDATEPHLAKPRNLKPYINRDKMKPIKVRAGQPVKFDVDVKGEPAPSLTWFLKETELTSTGQVRLENIDYNTKLTLLDTDRKQSGQYKLRAENINGVDEAVVEVIILDKPSKPEGPIEVSDIHKEGCKLKWRKPKDDGGIPITGYVIEKMDTATGKWVPAGSVDPEKYDIEIKGLDPNHRYQFRVKAVNEEGESEPLETESAITAKNPFDVSAPPGLPELEDWDEHHVKLKWEPPIRDGGSPITNYIIEVMDKDSGEFVKAVETDSPVCKGVVKKLEEGQQYKFRVRAVNKAGPSDPSEQTNWHVAKPRFLKPHIDRVNLKPVIVKTGLSISLDINIRGEPAPKVEWFFNNSSVTSDEHSVKIDNVDYNTKFFVMRAQRSQSGKYIIKATNEVGEDEAELEVTVLGKPGKPKGPLQVNDITKHSCKLKWEKPDDDGGSPIDYYEIEKLDPHTGQWLPCGKSTEPEAKVIGLHEGKAYKFRVRAVNKEGESEDLETEKPIIAKNPYDEPDRPGKPEPTNWDKDFVDLAWDPPKNDGGAPIQKYVIQMRDKSGRAWVDSATVPGDKCNGTVTGVEEGHEYEFRIVAVNKAGPSDPSDVSKSVIAKPRFLKPHIDRKNLQKKIMRSGQMLHIDALIKAEPPAKVTWTYNKTEIKTSDHIKIENEDYKTTFIMPKVKRADRGIYIVTAKNDSGSDTVEVELEVLCKPSKPKGPLAVSNVTAETLHLKWEKPEDDGGDPIEQYLVERMDTETGRWVPVLTTKTPEADVTGLTEGKEYLFRVKAVNSEGESEPLVTDIPTKAKNPFDAADTPGKPQIVDWSGNHCDLKWRAPEDDGGASITGYIVERKDPNTGKWQKALETSTPDCKARVNDLIAGNKYQFRIMAVNKAGKSKPSEPSDQMTAKDRFAPPKIDRTNIKDITIKAGQHIRFDIKVSGEPPATKVWLHNKARLENDDSNYNIDMESYRTKLTVPISKRFHSGKYTLKAENESGRDEASFEVIVLDKPGPPEGPLRVTDVHKEGCKLKWNAPLDDGGLPIDHYIIEKMDVESGRWLPSGRFKESFAELNNLEPSHEYKFRVLAVNTEGESEPLTGEQSVIAKNPFDEPGKPGTPEAVDWDKDHVDLVWRPPINDGGSPITGYVVEKREKGTDKWIKGTEITIPCLGEECKATVPTLNENCEYEFRVKAINAAGPGEPSDASKPIITKPRKLAPKIDRKNIRTYNFKSGEPIFLDINISGEPAPDVTWNQNNKSVQTTSFSHIENLPYNTKYINNNPERKDTGLYKISAHNFYGQDQVEFQINIITKPGKPEGPLEVSEVHKDGCKLKWKKPKDDGGEPVESYLVEKFDPDTGIWLPVGRSDGPEYNVDGLVPGHDYKFRVKAVNKEGESEPLETLGSIIAKDPFSVPTKPGVPEPTDWTANKVELAWPEPASDGGSPIQGYIVEVKDKYSPLWEKALETNSPTPTATVQGLIEGNEYQFRVVALNKGGLSEPSDPSKIFTAKPRYLAPKIDRRNLRNITLSSGTALKLDANITGEPAPKVEWKLSNYHLQSGKNVTIETPDYYTKLVIRPTQRSDSGEYLVTATNTSGKDSVLVNVVITDKPSPPNGPLQISDVHKEGCHLKWKRPSDDGGTPIEYFQIDKLEPETGCWIPSCRSTEPQVDVTGLSPGNEYKFRVSAVNAEGESQPLVGDESIVARNPFDEPGKPENLKATDWDKDHVDLAWTPPLIDGGSPISCYIIEKQDKYGKWERALDVPADQCKATIPDLVEGQTYKFRVSAVNAAGTGEPSDSTPPIIAKARNKPPIIDRSSLVEVRIKAGQSFTFDCKVSGEPAPQTKWLLKKKEVYSKDNVKVTNVDYNTKLKVNSATRSDSGIYTVFAENANGEDSADVKVTVIDKPAPPNGPLKVDEINSESCTLHWNPPDDDGGQPIDNYVVEKLDETTGRWIPAGETDGPVTALKVGGLTPGHKYKFRVRAKNRQGTSEPLTTAQAIIAKNPFDVPTKPGTPTIKDFDKEFVDLEWTRPEADGGSPITGYVVEKRDKFSPDWEKCAEISDDITNAHVPDLIEGLKYEFRVRAVNKAGPGSPSDATETHVARPKNTPPKIDRNFMSDIKIKAGNVFEFDVPVTGEPLPSKDWTHEGNMIINTDRVKISNFDDRTKIRILDAKRSDTGVYTLTARNINGTDRHNVKVTILDAPSVPEGPLRNGDVSKNSIVLRWRPPKDDGGSEITHYVVEKMDNEAMRWVPVGDCTDTEIRADNLIENHDYSFRVRAVNKQGQSQPLTTSQPITAKDPYSHPDKPGQPQATDWGKHFVDLEWSTPKRDGGAPISSYIIEKRPKFGQWERAAVVLGDNCKAHVPELTNGGEYEFRVIAVNRGGPSDPSDPSSTIICKPRFLAPFFDKSLLNDITVHAGKRLGWTLPIEASPRPLITWLYNGKEIGSNSRGESGLFQNELTFEIVSSLRSDEGRYTLILKNEHGSFDASAHATVLDRPSPPKGPLDITKITRDGCHLTWNVPDDDGGSPILHYIIEKMDLSRSTWSDAGMSTHIVHDVTRLVHRKEYLFRVKAVNAIGESDPLEAVNTIIAKNEFDEPDAPGKPIITDWDRDHIDLQWAVPKSDGGAPISEYIIQKKEKGSPYWTNVRHVPSNKNTTTIPELTEGQEYEFRVIAVNQAGQSEPSEPSDMIMAKPRYLPPKIITPLNEVRIKCGLIFHTDIHFIGEPAPEATWTLNSNPLLSNDRSTITSIGHHSVVHTVNCQRSDSGIYHLLLRNSSGIDEGSFELVVLDRPGPPEGPMEYEEITANSVTISWKPPKDNGGSEISSYVIEKRDLTHGGGWVPAVNYVSAKYNHAVVPRLLEGTMYELRVMAENLQGRSDPLTSDQPVVAKSQYTVPGAPGKPELTDSDKNHITIKWKQPISNGGSPIIGYDIERRDVNTGRWIKINGQPVPTAEYQDDRVTSNHQYQYRISAVNAAGNGKTSEPSAIFNARPLREKPRFYFDGLIGKRIKVRAGEPVNLNIPISGAPTPTIEWKRGDLKLEEGKRISYETNSERTLFRIDDSNRRDSGKYTVTAANEFGKDTADIEVIVVDKPSPPEGPLSYTETAPDHISLHWYSPKDDGGSDITGYIIEFTEFGVDDWKPVPGTCPNTNFTVKNLVEGKKYVFRIRAENIYGASEALEGKPVLAKSPFDPPGAPSQPTISAYTPNSANLEWHPPDDCGGKPITGYIVERRERGGEWIKCNNYPTPNTSYTVSNLRDGARYEFRVLAVNEAGPGHPSKPSDPMTAEHQRYRPDPPEPPKPDRITRNGVTLSWRPPRTDGKSRIKGYYVEMRPKNGKDWKTVNDIPINSTVYTVPSLKEGEEYSFRVVAENEVGRSDPSKPSQPITIEEQPNKPCMELGKVRDIVCRAGDDFSIHVPYLAFPKPNAFWYSNDNMLDDNNRVHKHLTDDAASVVVKNSKRADSGQYRLQLKNTSGFDTATINVRVLDRPSPPTRLRADEFSGDSLTLYWNPPNDDGGSAIQNYIIEKKEARSSTWSKVSSFCTVPFVRIRNLVLNKEYDFRVIAENKYGQSDPANTSEPILARHPFDIPNTPGIPHGIDSTEDSITIAWTKPKHDGGSPITGYIIEKRLLSDDKWTKAVHALCPDLSCKIPNLIENAEYEFRVAAVNAAGQSAYSGSSDLIFCRRPPHAPKITSDLSIRDMTVIAGDEFRITVPYHASPRPTASWSLNGLEVIPGERIKFDSNDYASMYYNKSAKRDETGSYTITLTNNKGSDTASCHVTVVDRPLPPQGPLNAYDITPDTCTLAWKTPLDDGGSPITNYVVEKLDNSGSWVKISSFVRNTHYDVMGLEPHYKYNFRVRAENQYGLSDPLDIIEPIVAKHQFTVPDEPGQPKVIDWDSGNVTLIWTRPLSDGGSRIQGYQIEYRDILNDSSWNAYDYIIKDTKYQLYNLINGSEYEFRIKAKNAAGLSKPSSPSLRFKLKGKFTVPSPPGAPQVTRVGKNYVDLKWEKPLRDGGSRITGYIIERRDIGGAVWVKCNDYNVLDTEYTVMNLIEMGDYEFRVFAVNSAGRSEPSLCTMPIKVCEVLGGKKPDWITRLQDKVAPFGKDYTLQCAASGKPSPTARWLRNGKEIQMNGGRMTCDSKDGVFRLHISNVQTGDDGDYTCEAMNSLGFVNTSGYLKIGSPPIINRCPSELKLPEGDNSKIKIFYSGDQPLTVILKKNNEVICDSNDDTHVKVNIFDDYVAIYIRNIVKSDGGPYQIEFTNESGSATGEFYVHITGMPSAPTGPMGISYINKNSCMLNWRPPSYDGGLKVSHYVIERKDVSSPHWITVSSTCKDTAFNVQGLIENQEYIFRVMAVNENGMGPPLEGLNPIRAKDPIDPPSPPGSPQITEIGGDFVHLEWEKPESDGGAHIQGYWIDKREVGSNTWQRVNATICAANQINCINLIEGRQYEFRIFAQNVAGLSTESSASQAVKIIDPQAASPPLIVKPLRDANCIQNHNAQFTCTINGVPKPTISWYKGAREISNGARYHMYSEGDNHFLNINDVFGEDADEYVCRAVNKAGAKSTRATLAIMTAPKLNVPPRFRDTAYFDKGENVVIKIPFTGFPKPRIHWVRDGENIESGGHYTVEVKERHAVLIIRDGSHLDSGPYRITAENELGSDTAIIQVQISDRPDPPRFPLIESIGTESLSLSWKAPVWDGCSDITNYYVERREHPLSSWIRVGNTRFTSMAVSGLTPGKEYDFRIFADNVYGRSDASDTSTLIKTKESVKKKPIERKWEIDANGRKLRGKADGPVKDYDSYVFDIYSKFVPQPVEISQQSVYDRYDILEEIGTGAFGVVHRCRERSTGNIFAAKFIPVSHSVEKDLIRREIDIMNQLHHQKLINLHDAFEDDDEMILILEFLSGGELFERITAEGYVMTEAEVINYMRQICEGIRHMHEQNIIHLDIKPENIMCQTRSSTNVKLIDFGLATRLDPNEVVKITTGTAEFAAPEIVNREPVGFYTDMWATGVLSYVLLSGLSPFAGDNDVQTLKNVKACDWDFDVESFKYISEEAKDFIRKLLVRNKEKRMTAHECLLHPWLTGDHSAMKQEINRDRYLAYREKLRRKYEDFERFLLPIGRLSEYSSLRKLLMEKYKIHDAVFDRRQAAPRFVIRPSSQFCYEGQSVKFYCRCIAIATPTLTWSHNNIELRQSVKFMKRYVGDDYYFIINRVKLDDRGEYIIRAENHYGSREEVVFLNVQPLPKEQPRYRTESTPVRRREPLPYTFWQEESETAPSFTFLLRPRVMQARDTCKLLCCLSGKPVPNVRWYKDGRELSKYEYAMTHSDGVVTMEIIDCKPSDSGKYSCKATNCHGTDETDCVVIVEGEWVTPEQAQLAHNFLYSGDRKYIEQPIKPAPLPIVTSRQYTSSSVQNTSEPQGDKVNVSNSNSSGISNKKKYASNSLQAPGSPSRSRSATKELILPPDDSLMCKPEFTKPLHDLTIHDGEQLILTCYVKGDPEPQISWSKNGKSLSSSDILDLRYKNGIATLTINEVFPEDEGVITCTATNSVGAVETKCKLTIQPLDKNINKRKVNAGDNAPKIVSHLESRFVRDGDAVNLACRIIGAQHFDVVWLHNNKEIKPSKDFQYTNEANIYRLQIAEIFPEDGGTYTCEAFNDIGESFSTCTINVTVPGDETKQPSFVKFPTSVSVLEGEGTTFECEIDSELLNLVWLKDGKPIDETLPRYSFTKDGHRYSFAVAKCNMDDVGQYQAKAVSGKAESICAFSMNVHTAES

SEQ ID NO: 191 - DNA, 1788 bp, Drosophila melanogaster
  Name: CG8795
  AE003699
  GI: 10726505
  Transcript: CT25350
atgctgcccactaacagttccggtgtcctggcaaccgatctacaactgtttcacaatgagaaatttctcttaaatctgacacaagtgctgaacatctccgcggacaacctgaccagccttctccagggcctggagccggaggagcttttgcccacggtgaccccgatgacaccactttcactgctggccaccctaagcgtgggctacgccctcatatttatcgccggcgttttgggcaacctcatcacatgcattgtcatttcgcggaacaactttatgcacacggccaccaacttttatctgtttaacctcgctatatccgacatgattttgttatgctcaggaatgccgcaggacctctataacctctggcacccggataattatcctttcagtgacagcatctgcatattggagagcgttctctcggaaacggcggccaatgcgacagttctaaccattaccgcgttcacagtcgaacgatatattgccatttgtcatccgttcaggcagcacacgatgtccaagttgtcacgggccgtaaagttcatatttgccatctggatagctgcccttttgctggccctgccccaagccattcagttctccgtggtgatgcagggcatgggaacatcgtgcacgatgaaaaacgacttttttgcccatgtgtttgctgtgtcgggcttcctgttctttggcggacccatgacggccatctgcgtgctctatgtcctcatcggggtgaagttgaaacggagccgactcctgcaggcgcttcccaggcgatgttacgatgtaaaccgggggataagcgcccaaacgcgagtcatccggatgctggtggcggtggccgtggccttcttcatctgctgggccccctttcacgcccagcggctgatggcggtctatggatccacctcgggcattgagtcccagtggttcaacgacgtgttcagcatcctcgactatacgtccggtgttctctacttcctctcaacttgcatcaacccgctgctctacaacatcatgagccacaagtttcgtgaggcttttaaggtaactttggctagacactttggacttggtggcaaaaatcagggaagggggcttcctcatacttacagcgctcttcgacgtaatcaaacgggttcactgcggctgcacacaacggacagcgttcgcaccacaatgacttccatggcgacgaccaccactgggctaaatggctctgccaatggcagtggcaatggaacgacaacgggtcagtcggtgcgcctgaaccgcgtgtccttggacagtgtccagatgcagggtcagaatcgcagccggcaagacctcttcgataatccgcgtcgcatgctccagacgcaaatatcgcagctgtcatcggtgggcgatgcccattccctcttggaggaggatttgcagtttcccggggagccactgcagcgccagcccacgatgtgctccattgacgagctcacagatgacttggccatctcgcggtcacgccttaaacttacgcgcatcacccgcccaccaggaggtgtgacggggggcgtggcaggaggcagcacaacaggggccgcggggtcggggggcgtgagcggtgacgagtcgagtggcaaagtgcgcaaggcgaaagtgaaagtgctcaagagctcaagcccgttcaagggtctcaggaccaaattcaattggcgtgccagacgcaaaggcagccacaaaccgcacgaaaagggggcgacggtgaatggaggcgacactgaagagcgggccgccttttaa

SEQ ID NO: 192 - protein, 599 aa, Drosophila melanogaster
  AAF54929
  GI:7299748
MAVKMLPTNSSGVLATDLQLFHNEKFLLNLTQVLNISADNLTSLLQGLEPEELLPTVTPMTPLSLLATLSVGYALIFIAGVLGNLITCIVISRNNFMHTATNFYLFNLAISDMILLCSGMPQDLYNLWHPDNYPFSDSICILESVLSETAANATVLTITAFTVERYIAICHPFRQHTMSKLSRAVKFIFAIWIAALLLALPQAIQFSVVMQGMGTSCTMKNDFFAHVFAVSGFLFFGGPMTAICVLYVLIGVKLKRSRLLQALPRRCYDVNRGISAQTRVIRMLVAVAVAFFICWAPFHAQRLMAVYGSTSGIESQWFNDVFSILDYTSGVLYFLSTCINPLLYNIMSHKFREAFKVTLARHFGLGGKNQGRGLPHTYSALRRNQTGSLRLHTTDSVRTTMTSMATTTTGLNGSANGSGNGTTTGQSVRLNRVSLDSVQMQGQNRSRQDLFDNPRRMLQTQISQLSSVGDAHSLLEEDLQFPGEPLQRQPTMCSIDELTDDLAISRSRLKLTRITRPPGGVTGGVAGGSTTGAAGSGGVSGDESSGKVRKAKVKVLKSSSPFKGLRTKFNWRARRKGSHKPHEKGATVNGGDTEERAAF

SEQ ID NO: 193 - DNA, 3148 bp, Drosophila melanogaster
  Name: CG10967
  AE003540
  GI: 10727955
  Transcript: CT30713
ccaccacttcgcttagttgtgttttcgtcttgccttttccactagtctctctcgcgaagtagttggaaaaatcaccttttgcaaagtttttcgctgggaccaaaaagctacatttttcaaaaaccgaaaggaaattacgctgatcgtccgtgtgtgcgtgcgtgtgtatgtgagagagtgtgtgccatcgatcctgcaagtgtgtgtttgtacgcgagtgtggggccgcaaattaaaagcaataccacactgaaaaccgagataatcgcacacggaaaagaacggtttaattcaattacaagtgaaattagagtgtgtgcccgataattgtcaactggccaggtggacggaaaagacggtggtggtgttacgtgaaaatttcggagatcgtcgagggccagagaatcacatttagtggctggccaaaggggaaagaaattgattttccattttccacaattgcaattggaagcaaaagcaaagcagaagagcgaagaaaataaaaggggagagcaagcgtgcgtgcacgagcgaaagagagtgtggagcgcgagggggtgtacgactgtgagagagagagagggagagtgggagagagcagcacttccaggcgtcgcatcctcctcctttttcgcatgcaatgaatattgtcggggaatatgaatacagctccaaggatatgctgggccatggcgcctttgccgtcgtctacaaaggacgtcatcgcaagaaacacatgccggtggccatcaagtgcatcacgaagaagggacaactgaagacgcagaatctgctcggcaaggagatcaagatcctgaaggagctcaccgagctgcaccatgagaatgtggtggctctgctggactgcaaggagtcccaggattgcgtcagcctggtcatggagtattgcaatggcggcgacttggcggattatctgagtgtcaaggggacgctcagcgaggataccgttagactcttcctcgtgcaactagctggtgctatgaaagcactttataccaaaggaattgtgcatcgtgatctcaagccacaaaacattttgctatcgcacaattatggcaaaacattgccagctccatcgaaaataaccctgaaaattgcggattttgggtttgcgcgattcctgaacgagggcgccatggcagccactctgtgcggctctcccatgtatatggcgcccgaggtgatcatgtcgctgcagtacgactccaaggcggatctctggtcgctgggaacgattgtctaccagtgtttgactggcaaggcgccattctatgcacaaacgcccaacgaactgaagtcctactacgagcagaatgctaacctggcaccaaaaattccaagtggcgtgtcaccggatctgagggatctgctgctgtgcctgctgcgccgcaactccaaggatcgcatctcgtacgagagcttctttgttcaccgcttccttcagggcaagaaggcggccgtgtcgccagttgacatgccaccgcttggcggaacaccacctgccaaggccaagagccccttgcagcagcagctggagcaggaactgaagctggtcaagctggccgagcaacagcagaaggagcgcgaggagcaggaggcccaggaggacgagaacacggtgtccgtggtggccaatccggccatttgtgccaccatcaccaacgtaggtgtcctgtgcgacagtgagaacaacagcggttcttgcagctcccacgaggactccgatgactttgtgctggtgccaaagaaccttccggaggaccagcgacagggtctggcccaagtccaagcccagcccgcttccggtggccaacgtccacagcagcaacaaaatcaatccagtccgccacgtcccagcagtctgcccatctctgaacccaaaccagtaccggctcccgctcggcggcaggtggccaggcccgggccgttaacggtagccacactgggtggccagcagataccccgatcgcagccaattagcgtaaagcaaccgcgaccggatcagcgcaagagcagtgtgagcagtgacattaactcgatctcaccgccggcggtgcagtttgccattggaacgccgcctacacgtatgcgttctgcctctggtggatcgctgtcggagacaccgccgccgcatgcaccgagcacctggcaggtgtcgccaggacactcgcaatcgccgttgcgtcgaagcggcaatagctcgccagttctgccatccgctgcgcttaccaaattgcccactttgggcagtccaacaatgctggtggcgccgggatcattgggctcgattggttcggcgggcagtggatcggagaacaacaatcagcatcacatgctgggaccgcgagcttttacgctgcccgaactgggggccactggtggcctacatagtctgctggacacaggagccggcggcggtggggaaccacatgcattccaggccccagaactgtccgaagagacgctgatggatcgcgagcacaacgagacattgtccaagctgaactttgtgctggcgctcaccgattgtatccaggaagttgccgattcgcgatgcgcaccgctctccacgttcatggtggccggcagtcagtcggcggcgcaagcggcgtcagcggatgcacagcagataccgccgcacgcacctgagcactgcaaacgggccgagcgcctggtgctgctcgtccggggactgcagctcctatcgtccgggatgaatctggcttcccagcagctaagcaatggccagctaaagccgtcgtccaatgtgaagaatgctttgctcaccatgaacgccaaataccggagcatgctgttcgaatcgaaacgcctcaatggcagcggactattgcagaaggcgaatgcatttaacataacggcggacaagattctctatgactacgcactggatatgtgccaggccgctgctctggatgagctactgaagaacacgaagaattgcttcgaacgttacaacacggcacacattctgcttcattcgttggtgcaaaagtgcaatcatccgcaggacaaaatgatgctgaacaaatatcgcgatgccgttgagaagcgtttgagcatattgcagcagcatggctatatatacatgaccgatgagaatgcttag

SEQ ID NO: 194 - protein, 835 aa, Drosophila melanogaster
  AAF49878
  GI:7294537
MNIVGEYEYSSKDMLGHGAFAVVYKGRHRKKHMPVAIKCITKKGQLKTQNLLGKEIKILKELTELHHENVVALLDCKESQDCVSLVMEYCNGGDLADYLSVKGTLSEDTVRLFLVQLAGAMKALYTKGIVHRDLKPQNILLSHNYGKTLPAPSKITLKIADFGFARFLNEGAMAATLCGSPMYMAPEVIMSLQYDSKADLWSLGTIVYQCLTGKAPFYAQTPNELKSYYEQNANLAPKIPSGVSPDLRDLLLCLLRRNSKDRISYESFFVHRFLQGKKAAVSPVDMPPLGGTPPAKAKSPLQQQLEQELKLVKLAEQQQKEREEQEAQEDENTVSVVANPAICATITNVGVLCDSENNSGSCSSHEDSDDFVLVPKNLPEDQRQGLAQVQAQPASGGQRPQQQQNQSSPPRPSSLPISEPKPVPAPARRQVARPGPLTVATLGGQQIPRSQPISVKQPRPDQRKSSVSSDINSISPPAVQFAIGTPPTRMRSASGGSLSETPPPHAPSTWQVSPGHSQSPLRRSGNSSPVLPSAALTKLPTLGSPTMLVAPGSLGSIGSAGSGSENNNQHHMLGPRAFTLPELGATGGLHSLLDTGAGGGGEPHAFQAPELSEETLMDREHNETLSKLNFVLALTDCIQEVADSRCAPLSTFMVAGSQSAAQAASADAQQIPPHAPEHCKRAERLVLLVRGLQLLSSGMNLASQQLSNGQLKPSSNVKNALLTMNAKYRSMLFESKRLNGSGLLQKANAFNITADKILYDYALDMCQAAALDELLKNTKNCFERYNTAHILLHSLVQKCNHPQDKMMLNKYRDAVEKRLSILQQHGYIYMTDENA

SEQ ID NO: 195 - DNA, 1305 bp, Drosophila melanogaster
  Name: CG3809
  AE003694
  GI: 10726480
  Transcript: CT12693
tcacatcaatcaaattaaacagttcgatacagtaaaacagcatgaacgacaaataggcgtagaatccatcaggtgtaggagttctcaagaatcggcgagggtctaatattgggaatgtccaggcgggtttttggcctcagtataaaatcattccgattgttccgaagaactccgatccatcccccagcattccagcatttttctggtggcgtctttcgaacttcctttaggagtttctgcgattgtcaggaacaccgaagaatggatctaccagagggaatacttatgggctttggcaaccccctgctggacatcacctgcaccgttgaggataatgtgatcctggagaagtacggcctggaagcaaatgctgcgatcattgctgatgaaaagcacgatgccctgtttgatgagttgatgaacatggaaaatgtcatctattcggcgggtggagcctgtcagaactcgatgcggatcttccagtggatcgtgcagacaccatttcgagctgtgttcatagggtcagtgggcaaggataagctaggtgatcgcatcgaaaagagggccaaatccgatggcctgctaacactttatcagctgaaggaagagctgccgacaggctcttgtgctgtgatcatcaacggtccaaaccgctcattagtggccaacttgggcgctgcctctctcttcagcgacgactggattgacgaggatgataacatctgcgccttggatcgcgccgagtacttctactttacgggcttctttctggccgtttgtccacctgccgtggagcgggtagctaggatgtgctgcgagaccaatcgaattatgatcctcaacttcagcgccgtgtttgtgctgcagatgcaaaaggaagccttgggcaatatcctgcagtacgtggatataatcatctgcaataaggaagaggccattgcatttagcgacaccaacgactggaagacgaagaatatctttgagatcggatctaggctgcagcaaatgcccaaggaaaatacccgaccaagactagtaatgattacggatgcggtgtgtcctgttctcgtcttccaggataacgatcgcgttctggaataccccgttccacccgtaaagcagggcgagattttcgacaccaatggttgtggcgacgccttcgtcggcggattcctggccatgtacgtccaaaggatgcccctggattactgcatccgaacggggattttcgcatcccagcaggtcctacacgtggtcggtgttcagatcgataagctgccaaagtttagcgagaaatgcatatga

SEQ ID NO: 196 - protein, 396 aa, Drosophila melanogaster
  AAF54757
  GI:7299571
MSRRVFGLSIKSFRLFRRTPIHPPAFQHFSGGVFRTSFRSFCDCQEHRRMDLPEGILMGFGNPLLDITCTVEDNVILEKYGLEANAAIIADEKHDALFDELMNMENVIYSAGGACQNSMRIFQWIVQTPFRAVFIGSVGKDKLGDRIEKRAKSDGLLTLYQLKEELPTGSCAVIINGPNRSLVANLGAASLFSDDWIDEDDNICALDRAEYFYFTGFFLAVCPPAVERVARMCCETNRIMILNFSAVFVLQMQKEALGNILQYVDIIICNKEEAIAFSDTNDWKTKNIFEIGSRLQQMPKENTRPRLVMITDAVCPVLVFQDNDRVLEYPVPPVKQGEIFDTNGCGDAFVGGFLAMYVQRMPLDYCIRTGIFASQQVLHVVGVQIDKLPKFSEKCI

SEQ ID NO: 197 - DNA, 4378 bp, Drosophila melanogaster
  Name: Ack
  AE003480
  GI: 10727290
  Transcript: CT34843
aaaaataccaaaagtgtttggccgtcgcgcattttcaattgcaaattaagcgcagctaactgcgattaacgacgatgtttccgcattagaaagaaaatcaagctgatttcagcgagttaacatattgaaaaagtaaagaattctcgctcttttcggttcttcgtggcacctgcgatttgcgttgctgtttttttcgtgcatttcgattcgtacacacgcacacatacacccagacccaaacggccgtgcagcgaatgcgtgtgtgtgtgaaattgtgcaaaaacgtgaaacgatcgagtgggatggtcggtgggggaggggctgagcgctgttgaaagcggaatattcattgttttctcgtgtgtgcactataaattaatatttacgtgtctgcgtcatgaggggaccactaaccgcccgccatcaaaatcagcagccaagcagacagctgctcatttggcgagtgtaaacaaagcagccaacacacacacacacacacgcacgcatacaatcgtttacattgcggcgactgcgacgccaactgcgctgtcttcaactcgaatatcgaatttcacatctttaagccagaaatctccatatccaccgcataaaccacttccatctgccgcaacatcttttgtctggacaacctgttcgcttacagacaggaagtttgccaattttctcaagtttagccaagtgcagcgactgcgacgtccgcgttgacgtcgacgctcctcagccagcgtcgcagcagctgcgcagctgtttaatattcggaaatgacctccacttcggcggtggatggtgggctcgggagcgagacggcctggctggaggatctgctgcgggaggtgcagctggagcagtttctggacaggatacgggacgacctacaggtgacccggctggcgcacttcgactacgtgctacctgacgatctggagcgatgtggtctggggaaaccggctattcgacggctgatggaggcagtgcggaaaaagaaggcccaccagtggcgcaagaacatcctgtccaaactaattggcggtggcaagcaaccctcgtccaagaagcagtcctccgccgcccgggaatccagtcagggcaatggcacccagcttacctgccttatccacgaaaaggacatcacaatgggactgaaactgggcgacggatcattcggtgtggtgcgtcgcggcgaatggagtgcttcgccggcgggcaaggtcatcccggtggccgtcaaggtgctgaagtcggacaacctcacccaaccgggcatcatcgatgacttcttccgcgaggttcaggctatgcacgccctggatcatgcgaatctggtgcggctttacggcgtcgtcttatcccagccgatgatgatgattacagagctggcggagcgcgggtcgctgctggatacgttgcgaaaacaatgccgccacacctcgctgaccatcatctggaactggtcggtgcagattgtgactggcatggcctatctggaacagaagcgctttctacatcgcgatctggcatgtcggaatgtcctcctggcagctggaaacaagatcaagatcggagattttggcctaatgcgtgccttgccccaagaggatgattgctatgtgatgtctgagcataagaaggtgccttttccctggtgcgctcctgaatcgctgcgcttccggcagttctcgcacgcctctgacacctggatgtttggcgtgacgctgtgggagatgtttagctttggcgaagatccatgggtgggactcaatggatcgcagatcctgcgcaaaatcgatcgcgaaggcgagcgactgcatcagccggatgcctgtccaccggacgtttatgctatgatgctgcaatgctgggataaaactccagcagagcgacccacttttgctgctctcaaagaatatttggccagtatgtcgcctcctgtgatgcgtgcttcccgaagtcaccacgagtccaagggactgcagatcgagcctggcgacacaatcgccattatcgatggacggcacgagctgaaattgataaagggccagaaccagcgaacattcgatataggaatctttcccagaaacctactggagcagcgcaaagtgggtgctgccggagatgtggtaatgcgaagcagcgttggaaatggttcgtcgtcttcgccattcggcttttgttggggcggagcagctgcaatggccaacggagatgatcgacagcgaaagtgtgcctcgatgacaaaccagccccatgccaaggagcgcaagtccacgtccagcaagcagtttgcgtacaacaaactggttaatgattccgctactggtcttcagcgacgaaatgcagtgaagcacaaaggagtggtggtgggcccgcagcgtcctccgccgccacaatttcaacaggagggcatactcatcgacatctcgcccgatatgcgacccatagccgaagctggaacaggaggagctaagggagcaggcgatagttcctcactgcaggcggacagctcgttttgcatactagacgctcccatagatgtgcccacttatgccggctccagtggatcgggggatcttaatgtctcgcccacgtactacaatgagcagccgcagttcgactttgatccggccaagatgacagcttcaccagggcgcctgcaaccgccgccgtaccagatgccaccaacttactcgaatacaatggagtttgtccaaaaacgagaccttcaccaacagcagctagcgacgcctgtaagggagcgagatcccttcgacaccacaaacgttgaaacgactgtggcactctactcgaatttcaaccagtctctggaagcagcttctccaccagcaccgatttataatagtccttcggtcaggaagagccttttcggtggctccaagtcgaataaagaaaacatacctgccctggaatcagcggctatgcagctaaatctcagtaatcttacattggagcgacacgacgccacctgcattcagccagtggagcctgtacctgctcctcctggtgatggagtactgctggacaagtccttcatcgccgaactggagaaggacatgtacagcaacgggcaaaacagagcgcaggaggagtaccagcgcaattctacgcagatgtatgccagcaaggatatggtgtataagcagaatctcacacccttaaagaacggtgcagcacccgggtcagttcactcgaatcattccagtccctcttcgaccgcgtcgcccaagcagaacaatgtggaggcagcagctgctgcggcagctaccacgcaaagtgtggtgaatcgtatttggtatgagcaagtggcgtccacgcagtccgagtactatgcccagccgccgacagagcaggcagaggagcagatctaccaaaaccatcgccaccagcagcagcagcagcaggagttgaaccattcgtttgttgcaatatccaatcgagtggtggcacccaaaaacaatgcgtactcctcaaccgcctcgctgtacgatgcagtggcggccagcacggcgggctccacatactacggccaagtgccgaatggcagtggagctgttctgtacgatgaagtgactcaggatgactacctgcggccaacgcgaccagctccattggcgccacctcctctctccgcgcagcagatccaacgaaggatggagaagatgcggctgcagcaacagcagcagctggacggagcccatcagctgtatgcgccagtgccctcggactacggtcgcgagcaggagaagctccagcagctaatgcaagagctgggcagctccgcggtggagcaggatgtgcgcaatgcactgcgtgcggccagcggagatgttggactagccacgcggcactacaaaatcgaccaactggcgaggcttggggtggctgggcgaccacagtgcgaacaggcgctgcagcagaccaactggagcttagaggtggcagctgaactactactgaatgccggctaaacccacaaactacaaccatgtattaccgcctcgaatgtaattgctttagttttacgtgctgaatattcttttaaacttagctaacgatgtatcgaatctttatcaaaatactcctaggtgaatgcgcgaatgcaaacacattgtcaacgactgtacaatttgttctatttaatgtaagcgatcgtataaaattattttataattgttattcgatgtccgcattttctgagatgccccgaatattttattcacactcgaaattgaatctttcgaatgaagacctcggttcgcttcggccggttaaggtcaaaaatgtcaaacgtatgcaacaattcatttgtttatcgaataaattatatgaaattgttacaaaa

SEQ ID NO: 198 - protein, 1073 aa, Drosophila melanogaster
  AAF47839
  GI:10727294
MTSTSAVDGGLGSETAWLEDLLREVQLEQFLDRIRDDLQVTRLAHFDYVLPDDLERCGLGKPAIRRLMEAVRKKKAHQWRKNILSKLIGGGKQPSSKKQSSAARESSQGNGTQLTCLIHEKDITMGLKLGDGSFGVVRRGEWSASPAGKVIPVAVKVLKSDNLTQPGIIDDFFREVQAMHALDHANLVRLYGVVLSQPMMMITELAERGSLLDTLRKQCRHTSLTIIWNWSVQIVTGMAYLEQKRFLHRDLACRNVLLAAGNKIKIGDFGLMRALPQEDDCYVMSEHKKVPFPWCAPESLRFRQFSHASDTWMFGVTLWEMFSFGEDPWVGLNGSQILRKIDREGERLHQPDACPPDVYAMMLQCWDKTPAERPTFAALKEYLASMSPPVMRASRSHHESKGLQIEPGDTIAIIDGRHELKLIKGQNQRTFDIGIFPRNLLEQRKVGAAGDVVMRSSVGNGSSSSPFGFCWGGAAAMANGDDRQRKCASMTNQPHAKERKSTSSKQFAYNKLVNDSATGLQRRNAVKHKGVVVGPQRPPPPQFQQEGILIDISPDMRPIAEAGTGGAKGAGDSSSLQADSSFCILDAPIDVPTYAGSSGSGDLNVSPTYYNEQPQFDFDPAKMTASPGRLQPPPYQMPPTYSNTMEFVQKRDLHQQQLATPVRERDPFDTTNVETTVALYSNFNQSLEAASPPAPIYNSPSVRKSLFGGSKSNKENIPALESAAMQLNLSNLTLERHDATCIQPVEPVPAPPGDGVLLDKSFIAELEKDMYSNGQNRAQEEYQRNSTQMYASKDMVYKQNLTPLKNGAAPGSVHSNHSSPSSTASPKQNNVEAAAAAAATTQSVVNRIWYEQVASTQSEYYAQPPTEQAEEQIYQNHRHQQQQQQELNHSFVAISNRVVAPKNNAYSSTASLYDAVAASTAGSTYYGQVPNGSGAVLYDEVTQDDYLRPTRPAPLAPPPLSAQQIQRRMEKMRLQQQQQLDGAHQLYAPVPSDYGREQEKLQQLMQELGSSAVEQDVRNALRAASGDVGLATRHYKIDQLARLGVAGRPQCEQALQQTNWSLEVAAELLLNAG

SEQ ID NO: 199 - DNA, 4515 bp, Drosophila melanogaster
  Name: Abl
  AE003526
  GI: 10727878
  Transcript: CT13380
atgggggctcagcagggcaaggacaggggcgcccactcgggaggaggcggctcgggggcccccgtcagctgcatcggcctctccagcagcccagtggcctccgtttccccccactgcatctccagttccagcggcgtcagcagcgcccccctcggcgggggctccacgctccgtggctcccgcatcaagtcctcgtcctccggcgtggccagtggcagcggatcgggcggaggcggtggcggatccggatcggggctgagccagcgtagtggcggacacaaggatgcacgctgcaatcccaccgtgggtctcaacatattcaccgagcataacgaagccctgctgcagtcgcgtccattacctcacattccggccggcagcacggcggcctctcttctggcggatgccgctgagctgcagcagcatcagcaggattccggtggactgggactgcagggctcctccctgggcggtggtcacagttcgactacatccgtgtttgaatccgcccatcggtggacctcgaaggagaacctactggcccccggacccgaggaggatgatccgcaactttttgtggcgctatacgatttccaagccggcggagagaatcaattgagtctgaagaaaggcgagcaggtgcgcatacttagctacaacaaatcgggggagtggtgcgaggcgcactcggactccggaaacgttggatgggtgccctccaactatgtcacgccgctcaattcgctggagaagcactcctggtaccacgggcctatctcacgcaacgccgccgagtatcttctcagctccggaatcaatggcagtttcctggtccgtgaaagtgaaagttcaccgggtcaaaggagcatcagtttgagatacgagggtcgcgtctatcactaccgcatctcagaggatcccgatgggaaagtcttcgttacccaggaggccaagtttaacactctggccgagctggtgcatcatcacagcgtgccccatgagggtcacggcctgatcacaccgctcctatatccggcgcccaagcagaacaagcccaccgtctttccgctgagtcccgagccggatgagtgggagatctgccggacggacatcatgatgaagcacaagctaggcggcggtcagtacggagaggtctacgaggccgtttggaagcggtatggcaatacggtggctgttaaaacgctcaaggaggacaccatggcactgaaggacttcctcgaagaggcggccatcatgaaggaaatgaagcaccctaatctggtgcagctcattggtgtttgcaccagagaaccaccgttctatatcatcaccgagtttatgtcgcacggcaatctgttggacttcctgcgctccgccggacgcgaaacgctcgatgcagtagcgttgctgtacatggccactcagatagcgtcgggaatgagctacctggagtcgcgcaactacattcatcgcgatctcgctgcccgcaattgcctggtgggtgacaacaagctggtcaaggtggcggatttcggcctggcacgtttgatgcgggacgacacgtatacagcacatgccggagccaagttcccgatcaaatggaccgcaccggagggtctggcctacaacaagtttagcaccaaatcagacgtttgggccttcggagtcttgctgtgggaaatcgccacgtatggaatgtcaccgtatccggccatcgatctgaccgatgtgtaccacaagctagacaagggctatcgcatggagcgaccgccaggctgcccgccggaggtgtacgacttgatgcgccagtgctggcagtgggatgccaccgacaggcccacgttcaagagcatacaccatgcgctggagcacatgtttcaggaatcgtccatcaccgaagcggtggaaaagcagctgaacgccaacgccaccagcgcgagcagctccgctccgagcacatcgggcgtggccaccggcggaggagccacaaccacgacggcggccagcggctgcgcttcctcatcctcggccaccgcctcgctaagtctcacaccgcagatggtgaagaagggtttacccggcggtcaggccctcacgccgaacgcccaccacaacgatccgcaccagcagcaggccagcacgcccatgtcagaaaccggatccacttccaccaagctaagcactttctccagccagggcaagggcaatgtccagatgcgtcgcaccaccaacaagcagggcaaacaggcgcccgccccaccaaagcgaaccagcctgctctcgagcagtcgggactccacttatcgcgaggaggatccagccaacgccagatgcaatttcatcgacgacctcagcacgaatggactagcccgggacatcaacagtttgacgcagcggtacgattccgaaacagatccggcagccgacccggacacagatgccacgggcgatagtctggagcagagtctgagccaagtgatagccgctccggtcaccaacaagatgcagcattctcttcacagcggaggaggaggaggaggaataggtcctcgatcctcgcagcaacacagctccttcaagcgaccgactggaacacccgtgatgggtaaccgaggactagagacccggcagagcaagcggtcccagctccattcacaggctccgggtccaggaccgccatcaactcaaccgcatcatggcaacaacggcgtggtgaccagtgctcatcccatcactgtgggtgcgctcgatgtgatgaatgtcaagcaggtggtgaaccgctacggaacactaccaaagggtgccagaatcggtgcctatctggacagtcttgaggatagcagtgaggctgctcctgctcttccggcaactgctccttctctgccaccagccaatggacacgccacgcctccggctgccagactaaatccgaaggccagccccattccgccacagcaaatgatcaggagcaactcgtcgggcggagtgaccatgcaaaacaatgcggctgccagcttaaacaagcttcagcgtcatcgcaccactaccgaaggcaccatgatgacgttctcctccttccgggcgggcggttccagtagctcacccaagcggagtgcctcgggagtggcttcaggagtccagccagctctggccaaccttgagtttccaccgcctccgttggacttgcctccgccgcccgaggaattcgaaggcggaccaccacctcctccaccggcgccggagagcgctgtgcaggccatccagcagcacttgcatgcccagctgccaaacaatggcaacattagcaatggaaacggaacaaacaacaacgacagcagccacaacgatgttagcaacatagctcccagtgtggaggaggccagctccagattcggtgtgtctctgagaaaacgcgagccctccaccgactcctgcagctcgctgggcagtccacccgaggatctcaaggaaaagctaatcaccgaaatcaaggcggccggcaaggatactgctccggcctcacatctggccaacggctcgggcatcgctgtcgtggaccccgtctccctgcttgtcaccgaactagccgagagcatgaacctgccaaagccgccgccgcagcagcagcaaaagctgaccaacggcaatagtactgggtccggattcaaggctcagctgaagaaagtcgagcccaaaaagatgagcgcgccaatgcccaaggcggagccggcaaataccatcatcgacttcaaggctcatctgcgccgggtggacaaggaaaaggagccagcaactccagctccagctccagctactgtagccgtagccaacaatgccaactgcaatacaacgggcactttgaaccggaaggaggacggcagcaagaagttctcgcaggccatgcaaaagactgaaatcaaaatcgacgtaacaaactcgaatgtggaggcggatgcgggagcagcgggcgagggcgatctcggcaagcggcgaagcacagatgacgaggagcagtcgcacacggagggcctgggatcgggaggccaaggatcagcagacatgacccagtcgctgtacgagcagaagccacagatccagcaaaagccagcggtgccgcacaagccaacaaagctaaccatctacgccacgcctattgccaaactgaccgaaccagccagctccgccagctccacacagatatcacgggagagcattctggagctggttggcctgctagagggctcgctcaagcacccggtgaatgccatcgctggatctcagtggctgcagctgagtgacaagctcaacatcctgcacaattcgtgcgtgatcttcgcggagaacggagcgatgccgccgcactccaagttccagttccgggagctggtcacgcgcgtggaagcacagtcgcagcacttgcgctccgccggcagcaagaacgtccaggacaacgagcgcctggtggccgaagtcggtcagtcgctgcgtcagatctccaatgcgcttaacaggtaa

SEQ ID NO: 200 - protein, 1620 aa, Drosophila melanogaster
  AAF49431
  GI:7294076
MGAQQGKDRGAHSGGGGSGAPVSCIGLSSSPVASVSPHCISSSSGVSSAPLGGGSTLRGSRIKSSSSGVASGSGSGGGGGGSGSGLSQRSGGHKDARCNPTVGLNIFTEHNEALLQSRPLPHIPAGSTAASLLADAAELQQHQQDSGGLGLQGSSLGGGHSSTTSVFESAHRWTSKENLLAPGPEEDDPQLFVALYDFQAGGENQLSLKKGEQVRILSYNKSGEWCEAHSDSGNVGWVPSNYVTPLNSLEKHSWYHGPISRNAAEYLLSSGINGSFLVRESESSPGQRSISLRYEGRVYHYRISEDPDGKVFVTQEAKFNTLAELVHHHSVPHEGHGLITPLLYPAPKQNKPTVFPLSPEPDEWEICRTDIMMKHKLGGGQYGEVYEAVWKRYGNTVAVKTLKEDTMALKDFLEEAAIMKEMKHPNLVQLIGVCTREPPFYIITEFMSHGNLLDFLRSAGRETLDAVALLYMATQIASGMSYLESRNYIHRDLAARNCLVGDNKLVKVADFGLARLMRDDTYTAHAGAKFPIKWTAPEGLAYNKFSTKSDVWAFGVLLWEIATYGMSPYPAIDLTDVYHKLDKGYRMERPPGCPPEVYDLMRQCWQWDATDRPTFKSIHHALEHMFQESSITEAVEKQLNANATSASSSAPSTSGVATGGGATTTTAASGCASSSSATASLSLTPQMVKKGLPGGQALTPNAHHNDPHQQQASTPMSETGSTSTKLSTFSSQGKGNVQMRRTTNKQGKQAPAPPKRTSLLSSSRDSTYREEDPANARCNFIDDLSTNGLARDINSLTQRYDSETDPAADPDTDATGDSLEQSLSQVIAAPVTNKMQHSLHSGGGGGGIGPRSSQQHSSFKRPTGTPVMGNRGLETRQSKRSQLHSQAPGPGPPSTQPHHGNNGVVTSAHPITVGALDVMNVKQVVNRYGTLPKGARIGAYLDSLEDSSEAAPALPATAPSLPPANGHATPPAARLNPKASPIPPQQMIRSNSSGGVTMQNNAAASLNKLQRHRTTTEGTMMTFSSFRAGGSSSSPKRSASGVASGVQPALANLEFPPPPLDLPPPPEEFEGGPPPPPPAPESAVQAIQQHLHAQLPNNGNISNGNGTNNNDSSHNDVSNIAPSVEEASSRFGVSLRKREPSTDSCSSLGSPPEDLKEKLITEIKAAGKDTAPASHLANGSGIAVVDPVSLLVTELAESMNLPKPPPQQQQKLTNGNSTGSGFKAQLKKVEPKKMSAPMPKAEPANTIIDFKAHLRRVDKEKEPATPAPAPATVAVANNANCNTTGTLNRKEDGSKKFSQAMQKTEIKIDVTNSNVEADAGAAGEGDLGKRRSTGSINSLKKLWEQQPPAPDYATSTILQQQPSVVNGGGTPNAQLSPKYGMKSGAINTVGTLPAKLGNKQPPAAPPPPPPNCTTSNSSTTSISTSSRDCTSRQQASSTIKTSHSTQLFTDDEEQSHTEGLGSGGQGSADMTQSLYEQKPQIQQKPAVPHKPTKLTIYATPIAKLTEPASSASSTQISRESILELVGLLEGSLKHPVNAIAGSQWLQLSDKLNILHNSCVIFAENGAMPPHSKFQFRELVTRVEAQSQHLRSAGSKNVQDNERLVAEVGQSLRQISNALNR

SEQ ID NO: 201 - DNA, 2838 bp, Drosophila melanogaster
  Name: CG7362
  AE003706
  GI: 10726534
  Transcript: CT22669
atgctacctacgggaaacagctttccgaagaataatgggaaaataatgcctctaattatcattaataaatcgagagacaagtcaacaaacccggccgtcgagtcaacaacttggttgcgcttcaaggcagccaaggaaaaacgtttccttttggccaatggattggatgacggccaaacaatgcgtccagtttggacaaacatttgcagcagcaaacccatttcatgcccattcccaacttcccacgttgcacggcaggaacccaagaagtttcggctagaccgtggaccctacctttcccagctggactaccaatctcgtctgcagttccaagcaccagctctgaggttaccccttaccagcattatatgcaccattggaccctcatccagccagcccgaggttcttcttaatctcattcacgctgggatgaaggtggtccgattggacttctccgacggcacccacgattgccattgccaggctatccaggcggctcgtaaagccatcgccatgtatgcggaggaaacgggtcttcccaggagcttggccattgccctggacaccaagggtccggtaatcaatccacagggtgtagctgctgatttaaacgccataaccgaacaagacaaactggatctcaagtttggagcggatcaaaaggttgacatgatcttcgcatcgttcatccgcgatgccaaagctttgaaagaaattcgccaggcactgggtgcctgtccatcaagtgagcacataaagatcatttccaagatcgaaagtcaacaggctctggcgaacatagatgagataatccgcgaatccgatggcataatggtggcccttgggaatatgggcaacgaaatagcactggaggctgtaccgctggcccagaaatcgattgtggccaagtgcaacaaggttggaaagcctgtgatctgtgccaatcaaatgatgaattcgatgataaccaagccacgtcccactcgcgccgaatcctctgatgtggcaaacgcaatcttggatggttgtgatgcccttgtgttgtcagatgaaacggccaagggtaagtacccggtgcaatgtgtgcagtgcatggccagaatatgcgccaaagtcgagtcggttttatggtacgagagcattcagaacaacctcaagagcgaagtccggatcaacgccgccgatcacatctcggcggtaagcacggcaattgcagaagcggcaacggtgagtcaggctcaggcaatagtggtggccagtccgtgctccattgtgtcccagatggtcagtcaaatgaggccgccgtgtcctatcgtgttgctcacaggctgcccacatgaggccgctcaatccttgctttttcgtggcgtttatccactccttgtcaaggaaatggtttatggcagcgtaaactactgtcgcatcatgcaatcgggcttaaagatattggccaagttggacatcctgaaggcaggccaaaggggaactttggtgctggtcaatgccatgtcggcagacaagctcaccttcaggctgttcacttttgcacagccaactgaggcagagcgagaagaagaacgctgccgaaagttggccaggaagcagcgatgcaaggaaatgtctgtaaataaatcctgtccaaatccaaagagcagtaagtctgaaatatctataaagtccgatgaaaaagatggtaccagttcaaagaaagaatttcctaaggacgaagaagtttcgaaatgtttacaactagaaaatgaaattcagcagaaacggggtgaagattctgtaatgaacaaagaaaatgaaaatctctgccacaacgtggcattgaagtgcttacatttgaagaatgaaagacaagctcaatcggaagctatgatgaaacagacggaaaaacttaaaaaagcggaagatcctagaaaaaacaatgggacccttaaggatagttttaaccgtaagaaaaaagacgataaaacctcgaagtccgataaaaaggatggttccagctcaaagaaagatcgtcctaaccacaaggaagtctggaaatgtttacagcggagtcaagatttggtaatggcagaagaaaatgaatatctctgttcaaaaaaatcaaaagaatgtcccaataaggacgacgaggccttgaagtgcttacagctgaaaaaacaaagacaagctcgagcggaagctgagatgaaaaagaaggcagaactaaaaaaaaataatagtttaagccataagaaagaagacgataaagcaccaaactgcaacaaacttaaaaaacaaggcccaaagaagaataagtgcagagtagtcaaaatttcgaggacatccgaaaaggataattatattccgaagaaagaatatcctaggatcttcaatatagaaaaggctcagccaaaaactgtggtcaaacacagtaaagagttggcaaagtcctgcgatattgtactcgaaaactgcaagaccgtaaaacgcaaaaactgcaagactgtaaaattagaaaaatgtaagacagtaaaacttgaaaactgcaaaataacaaaacttaagaagtgcaaaacgatcaagctcgaaaattgtaagcagccgcgaagagttaggcaaagaactaatcttactaaaaaggcatacactttcagtactagagatacgaggaaaaaaataattccaccaaagcgttatcgcgttgtacgcggctctgcaattgttaaacaactaaaggaaaataaagccagcgagagtccaacagctgcgagcagattgtcgagtttcgctgaatgcgatagatttagcgagagagaaaagatacatttacggagagcgaatcgctga

SEQ ID NO: 202 - protein, 1010 aa, Drosophila melanogaster
  AAF55096
  GI:7299922
MLPTGNSFPKNNGKIMPLIIINKSRDKSTNPAVESTTWLRFKAAKEKRFLLANGLDDGQTMRPVWTNICSSKPISCPFPTSHVARQPQNSDFFIKFYIYLVCITQIIFFFKIRKYAGNLCQRASLCVVSPCPNFPLSLRFRCYADKCKRKMEPKKFRLDRGPYLSQLDYQSRLQFQAPALRLPLTSIICTIGPSSSQPEVLLNLIHAGMKVVRLDFSDGTHDCHCQAIQAARKAIAMYAEETGLPRSLAIALDTKGPVINPQGVAADLNAITEQDKLDLKFGADQKVDMIFASFIRDAKALKEIRQALGACPSSEHIKIISKIESQQALANIDEIIRESDGIMVALGNMGNEIALEAVPLAQKSIVAKCNKVGKPVICANQMMNSMITKPRPTRAESSDVANAILDGCDALVLSDETAKGKYPVQCVQCMARICAKVESVLWYESIQNNLKSEVRINAADHISAVSTAIAEAATVSQAQAIVVASPCSIVSQMVSQMRPPCPIVLLTGCPHEAAQSLLFRGVYPLLVKEMVYGSVNYCRIMQSGLKILAKLDILKAGQRGTLVLVNAMSADKLTFRLFTFAQPTEAEREEERCRKLARKQRCKEMSVNKSCPNPKSSKSEISIKSDEKDGTSSKKEFPKDEEVSKCLQLENEIQQKRGEDSVMNKENENLCHNVALKCLHLKNERQAQSEAMMKQTEKLKKAEDPRKNNGTLKDSFNRKKKDDKTSKSDKKDGSSSKKDRPNHKEVWKCLQRSQDLVMAEENEYLCSKKSKECPNKDDEALKCLQLKKQRQARAEAEMKKKAELKKNNSLSHKKEDDKAPNCNKLKKQGPKKNKCRVVKISRTSEKDNYIPKKEYPRIFNIEKAQPKTVVKHSKELAKSCDIVLENCKTVKRKNCKTVKLEKCKTVKLENCKITKLKKCKTIKLENCKQPRRVRQRTNLTKKAYTFSTRDTRKKIIPPKRYRVVRGSAIVKQLKENKASESPTAASRLSSFAECDRFSEREKIHLRRANR

SEQ ID NO: 203 - DNA, 1579 bp, Drosophila melanogaster
  Name: Cyp9f2
  AE003695
  GI: 7299572
  Transcript: CT17908
acgcttagatcgccaagctagggtcaacatgttgtgggagttcttcgccctatttgcgatcgctgccgccttgttctaccgttgggcgtccgccaacaatgatttcttcaaggataggggcatcgcctatgaaaagccagtgctctactttggcaacatggccggcatgttcctgcggaagagggccatgtttgacatagtctgtgatctctacaccaaaggcggaagtaagaaattttttggtatctttgagcagcgacaaccacttttaatggtgcgcgacccagatcttatcaagcagataaccataaaggacttcgatcactttatcaatcatcgcaatgtgtttgccaccagcagcgatgatgatccacatgacatgagtaaccttttcggcagctcgctgttctccatgcgagatgctcggtggaaggatatgcgaagcactctgagtccggcatttacaggcagcaaaatgcgtcagatgttccagctgatgaaccaggtggccaaggaggccgtggactgtcttaagcaggatgattcaagggttcaggagaatgaactggacatgaaggactactgcacacgattcaccaatgatgtgatcgcctcgacagcctttggactgcaagtgaactcgttcaaggatcgcgaaaataccttctatcagatgggaaaaaagttgaccacatttacattcctgcagagcatgaagttcatgttgttcttcgcattgaagggtcttaataagatccttaaggtcgagcttttcgataggaaaagcactcagtatttcgtgcgtctggtgctcgatgctatgaaataccgacaggagcacaatattgtacgtcccgacatgataaacatgctgatggaggctcgtggtatcatccagacggagaagaccaaggcatctgccgttcgcgagtggagcgatcgcgacattgtcgcccagtgtttcgtgttcttctttgctggcttcgagacttcggcggtgctgatgtgcttcaccgctcacgagctaatggagaaccaggatgtgcagcagaggctatacgaggaggtacagcaagtggaccaagacctggagggcaaagaactgacctatgaggcaattatgggcatgaagtatctggatcaggtcgtcaacgaggttctgcgaaagtggccggcggcaattgccgtcgatcgagaatgcaacaaggatatcaccttcgatgtggatggccagaaagtcgaggtcaagaagggcgatgtcatctggctgcctacatgcggcttccatcgtgatcccaagtactttgagaaccctatgaagttcgatccggaacgttttagcgatgagaacaaggagtctattcagccattcacatacttcccctttggcctgggtcaacgcaactgcattggttcccgattcgctctacttgaagcaaaggctgttatctactatcttttgaaggactaccgctttgcccctgccaagaaatcctgcattccactagagctcattacttccggttttcagttgtcacccaaaggcggcttttggattaaacttgttcaaaggaactaa

SEQ ID NO: 204 - protein, 516 aa, Drosophila melanogaster
  AAF54803
  GI:7299618
MLWEFFALFAIAAALFYRWASANNDFFKDRGIAYEKPVLYFGNMAGMFLRKRAMFDIVCDLYTKGGSKKFFGIFEQRQPLLMVRDPDLIKQITIKDFDHFINHRNVFATSSDDDPHDMSNLFGSSLFSMRDARWKDMRSTLSPAFTGSKMRQMFQLMNQVAKEAVDCLKQDDSRVQENELDMKDYCTRFTNDVIASTAFGLQVNSFKDRENTFYQMGKKLTTFTFLQSMKFMLFFALKGLNKILKVELFDRKSTQYFVRLVLDAMKYRQEHNIVRPDMINMLMEARGIIQTEKTKASAVREWSDRDIVAQCFVFFFAGFETSAVLMCFTAHELMENQDVQQRLYEEVQQVDQDLEGKELTYEAIMGMKYLDQVVNEVLRKWPAAIAVDRECNKDITFDVDGQKVEVKKGDVIWLPTCGFHRDPKYFENPMKFDPERFSDENKESIQPFTYFPFGLGQRNCIGSRFALLEAKAVIYYLLKDYRFAPAKKSCIPLELITSGFQLSPKGGFWIKLVQRN

SEQ ID NO: 205 - DNA, 5886 bp, Homo sapiens
  AB002369
gacgtcccagcggctcaggcgctgcccagcgccggccctggcagggagcctggtggggtggcggagggggagactgtgccgtggagggcctcgccatgtcctgctgcccgacttccttgtgaaacctcctagtagaaaaagttcttgggacaaacttcatttgacttcaccataagggaaagaagagagccttgttggacactgaagaagggacggggatttctcctcctaatctgggcctcttgtcatggatgaagagactcggcacagccttgagtgcatccaggccaatcagatctttcccaggaagcagctgatccgggaggatgagaatcttcaggttcctttccttgaacttcatggagagagcacagagtttgtgggccgtgccgaggatgccatcattgccctttccaattacagacttcacatcaagttcaaggagtctcttgttaatgttccattacagcttatagaaagtgttgaatgccgagatatatttcagcttcatttgacttgcaaagactgcaaagttatcaggtgtcagttttcaacctttgagcagtgtcaagagtggctgaagagactgaacaacgcaatccgaccacctgctaaaatagaagatctcttctcatttgcataccatgcttggtgcatggaggtctatgccagtgaaaaagagcaacatggagacctgtgcagaccaggggagcatgtaacttcaaggtttaaaaacgaggtggagaggatgggttttgatatgaacaacgcctggaggatttccaacatcaatgagaagtacaaattatgtggtagctatcctcaagagctcatagtgcctgcctggatcactgacaaagaactggaaagtgtatcaagtttcaggtcctggaagcgcatccctgccgtcatctacaggcaccagagcaatggagctgtcattgcccgctgtggacagccagaggttagctggtggggctggcgaaatgcagatgatgagcatctggtacagtcagtagccaaagcttgtgcctctgactcccgatcgagtggcagcaagctgtcaactaggaacacttctcgagactttcccaatgggggagacctttctgacgtggagttcgattcttctctgtcaaatgcttcaggagcagagagtttagccatccaaccgcagaagcttttgatcttggatgcacgctcctatgcagctgctgtggcaaaccgagccaaaggaggaggctgcgaatgcccagagtattacccaaactgtgaagttgtgtttatggggatggcaaacattcattctattcggaggagttttcagtctctgcggttgctgtgcactcagatgccagatccgggaaattggctatcagctcttgaaagcacaaaatggctccatcacttgtctgtgcttctgaaatcagcgcttctggtagtgcatgctgtggatcaggatcagcggccggtgctagtacactgctcagatggctgggaccgcaccccccagattgtggcattggctaagctcttgctggacccttattaccgaaccatagagggtttccaggtcctcgtggaaatggagtggctggattttggccataaatttgctgaccggtgtggtcatggggagaactcggatgatctgaatgaacgttgcccagtgtttctgcagtggcttgactgtgttcatcagcttcagaggcaatttccttgctcttttgagttcaatgaagcattccttgtgaaactggtgcagcatacctattcctgcctgtttggaacattcctgtgcaacaacgccaaggagagaggggaaaagcatactcaggaacggacatgttccgtgtggtcacttcttcgggcaggcaacaaggctttcaaaaacctactgtattcctctcagtcagaagccgtgctgtaccctgtgtgccatgtgcgtaacctgatgctgtggagtgcagtgtacctgccctgcccatccccaaccacccctgtggacgacagctgtgcaccatacccagccccaggcaccagccctgatgatccccccctgagccggctaccaaagactagatcatacgacaatctgaccacagcctgtgacaacacagtgcctctggccagccggcgctgcagcgaccccagcctgaacgagaagtggcaggagcaccggcgctcactagagctgagcagcctggctggccctggagaggatcccctttctgccgacagcctagggaagcccaccagagtgccggggggtgccgagctttctgttgcagccggagtagctgaggggcagatggagaacatcttgcaggaggccaccaaagaggagagtggagtagaggaacctgcccacagggcaggcattgagatacaggagggtaaagaggaccctctcttagaaaaggagagcaggaggaagacacctgaggcctcagccattggacttcaccaagacccagaactgggtgatgctgctctgaggagccatctggatatgagctggcctctgttctcacagggcatttctgaacagcagagtgggctcagtgttctcctcagttctctccaggtcccccccaggggagaggattccctggaggtccctgtggagcagtttcgaatagaagagattgcagagggtagggaggaagcagttcttccaatcccagtagatgcaaaagttggctatggtacctcacagtcatgttctctgctaccttcccaagtcccttttgagaccagaggaccaaacgtggacagttctacagacatgttagtggaagataaggtgaagtcagtaagtgggccccaaggtcatcatagatcttgccttgtaaatagtggcaaggacaggcttcctcagaccatggaacccagcccttcagagacaagcctggtcgagaggccccaagtggggtctgtggtgcataggacttcccttggcagcactctcagcctgacacgttccccttgtgccttgcctttagccgaatgtaaagaggggcttgtgtgcaatggtgccccagagactgaaaacagggcctcagagcagcccccaggtcttagcaccctccagatgtaccccacacccaatgggcattgcgccaatggggaggctggtaggagcaaggactcactgagccgtcagctgtctgctatgagctgcagctctgcccacttacactcaaggaacttgcaccacaagtggctgcatagccactcaggaaggccatctgcaaccagcagccccgaccagccttcccgcagccacctggacgatgatggcatgtcagtgtacacagacacgatccaacagcgcctgcgtcagattgagtcaggccaccagcaggaagtagaaactttgaagaaacaagtccaggagctgaagagtcgcctggagagccagtacctgaccagctccctacactttaatggagactttggggatgaggtgacttcaatccccgactcggaaagcaatctggatcagaactgtttgtctcgctgcagcacagagattttctctgaagccagctgggagcaggtggataaacaggacacagagatgacccgttggcttcctgaccacctggccgcccactgctatgcgtgcgacagtgccttctggcttgccagcaggaagcaccactgcaggaattgtgggaacgtattctgctccagttgttgtaaccagaaggttccagttcccagccagcagctctttgaacccagtcgagtatgcaagtcttgctatagcagcctacatcccacaagctccagcattgaccttgaactggataagcccattgctgccacttccaactgaagctcagtgacctgggtgggcagtggccaagctgctgttcctatgacaggcccactcaacctgggcagaccgagaggcccgtgcactttggaatgggagcgtggaaccacctgtacagagtgacagatttgggatgcaccactggattgtagattgatttttctttcctgtccccctactccctccctaccttttccatcctcctcctctgccttcaaaaaaggaaactttcccttggttgtcttaattttttttttttttgatggaagaccaagggttgccaggcccactgtaactgccgagctgcctgctgtcacgtgacactgagggatggcttgtttcttccgggtgggaggatggtggtcagagccaggagtatggagatctgagaccgtgagcagggaagaaagccagtgctaacatgcaaccattcctcacgccaccgccacatcagagctggttgggaaccctttgctgctggggaggctggaagcatattccccaagagcactgccctgggcatcatctccctcctgcgaggagctgagccagtcccctcacagatggataaatgaggctgatgtttggagggagaggcacacggtaaatggcatccccttaggcgcctctttgggaaaggaaagtggatgctcctttgaggcaggcgaggggctgggagtgggtagccgtcatgttgtcccccgtgggatcccatttttaacttgacccagattgtcttgggctccttttactttcagggggctgctttcctgggccaggctgtgtagcacttcccaccctcaggcatgagtacagactggtcaaaatgtttatgcagtcaaggccaaagcctgccctgagcccagacacacctgggtccccattctggggcctggtcccctaaacaatctcttcctcagccagcacagggaaatccagactcagggttccagaaatcccccgttcccaaaccaaaccaatcatggatcttccctttaaggggtagaatcagcctttagagttacaagcccctggaaaagggagcaggtcccatacaatcagcctttctcctcttctcttcttgggacaggaataactgctgagcagtccccctttgccactcctggctgtctgagtgggcacttgtctggctgctggccagcagtgaagggccacttggtgacttcgtagggttccttagagaagtgacatggccttgaggagattcagggcacctttcctcagtgagctttgatatggtccaaaaacagccttaaatcaagaatatttgtggaggtaggtgtggggaaggttggagaagagttaggtttgtgctttgtaatcttggcatccatgttttgtgcctgccctccctcttggggaggccatgcttgactctgctgaaagctgctaactggtgacagggtggatcatggtgaggactaggggtaaggtcagggaatgcttaagctctggccctgccctgtattcctcttccccttggtagcagttccctgaccaagggcaaggtgtgtctcaggaaggtggttctgtgcatgcctgggtgtggttaaggcgtggcccagaaggcttccctggtgctctcagtccaggcaaagcccagagcatctgagcacgtctctgacttccagtggcaacacagtttgaacgtggtgaaacagggtgtagttcttttccacattctgtgtcatctagtcgtgcaggtagggaaaaagttggtctaattgaagattgtgcatttcctagtgacaggtgccaagaggttatgatacgggtttcttgggtctgatgtacagtgtgaataaatgcttgcagctcttagctcttttttgatcgatgaagcacttttttattaatattttcctttgttaaaggaggaaccgtaactctccatagctgtacatataacccttttctcctaaagaggagtcagtcagtgctcctatatttttcattttttgtcaaagcaagaagtaaatactttagaattgttaaatatataaataaagcaaataaagttg

SEQ ID NO: 206 - protein, 1198 aa, Homo sapiens
  Q9UEG3
MDEETRHSLECIQANQIFPRKQLIREDENLQVPFLELHGESTEFVGRAEDAIIALSNYRLHIKFKESLVNVPLQLIESVECRDIFQLHLTCKDCKVIRCQFSTFEQCQEWLKRLNNAIRPPAKIEDLFSFAYHAWCMEVYASEKEQHGDLCRPGEHVTSRFKNEVERMGFDMNNAWRISNINEKYKLCGSYPQELIVPAWITDKELESVSSFRSWKRIPAVIYRHQSNGAVIARCGQPEVSWWGWRNADDEHLVQSVAKACASDSRSSGSKLSTRNTSRDFPNGGDLSDVEFDSSLSNASGAESLAIQPQKLLILDARSYAAAVANRAKGGGCECPEYYPNCEVVFMGMANIHSIRRSFQSLRLLCTQMPDPGNWLSALESTKWLHHLSVLLKSALLVVHAVDQDQRPVLVHCSDGWDRTPQIVALAKLLLDPYYRTIEGFQVLVEMEWLDFGHKFADRCGHGENSDDLNERCPVFLQWLDCVHQLQRQFPCSFEFNEAFLVKLVQHTYSCLFGTFLCNNAKERGEKHTQERTCSVWSLLRAGNKAFKNLLYSSQSEAVLYPVCHVRNLMLWSAVYLPCPSPTTPVDDSCAPYPAPGTSPDDPPLSRLPKTRSYDNLTTACDNTVPLASRRCSDPSLNEKWQEHRRSLELSSLAGPGEDPLSADSLGKPTRVPGGAELSVAAGVAEGQMENILQEATKEESGVEEPAHRAGIEIQEGKEDPLLEKESRRKTPEASAIGLHQDPELGDAALRSHLDMSWPLFSQGISEQQSGLSVLLSSLQVPPRGEDSLEVPVEQFRIEEIAEGREEAVLPIPVDAKVGYGTSQSCSLLPSQVPFETRGPNVDSSTDMLVEDKVKSVSGPQGHHRSCLVNSGKDRLPQTMEPSPSETSLVERPQVGSVVHRTSLGSTLSLTRSPCALPLAECKEGLVCNGAPETENRASEQPPGLSTLQMYPTPNGHCANGEAGRSKDSLSRQLSAMSCSSAHLHSRNLHHKWLHSHSGRPSATSSPDQPSRSHLDDDGMSVYTDTIQQRLRQIESGHQQEVETLKKQVQELKSRLESQYLTSSLHFNGDFGDEVTSIPDSESNLDQNCLSRCSTEIFSEASWEQVDKQDTEMTRWLPDHLAAHCYACDSAFWLASRKHHCRNCGNVFCSSCCNQKVPVPSQQLFEPSRVCKSCYSSLHPTSSSIDLELDKPIAATSN

SEQ ID NO: 207 - DNA, 2263 bp, Homo sapiens
  X74008
aggaagtagggagcggggtggcaggggggggacccgccgcggctgctgccaccgccgccaccaccgcctctgctcgtggcgtgggaaaggaggtgtgagtcccgggcgcgagccgcggcggcgccgctgcgggagggtcggcggtgggaaggcgatggcggatttagataaactcaacatcgacagcattatccaacggctgctggaagtgagagggtccaagcctggtaagaatgtccagcttcaggagaatgaaatcagaggactgtgcttaaagtctcgtgaaatctttctcagtcagcctatcctactagaacttgaagcaccactcaaaatatgtggtgacatccatggacaatactatgatttgctgcgactttttgagtacggtggtttcccaccagaaagcaactacctgtttcttggggactatgtggacaggggaaagcagtcattggagacgatctgcctcttactggcctacaaaataaaatatcctgagaatttttttcttctcagagggaaccatgaatgtgccagcatcaacagaatttatggattttatgatgaatgtaaaagaagatacaacattaaactatggaaaactttcacagactgttttaactgtttaccgatagcagccatcgtggatgagaagatattctgctgtcatggaggtttatcaccagatcttcaatctatggagcagattcggcgaattatgcgaccaactgatgtaccagatcaaggtcttctttgtgatcttttgtggtctgaccccgataaagatgtcttaggctggggtgaaaatgacagaggagtgtccttcacatttggtgcagaagtggttgcaaaatttctccataagcatgatttggatcttatatgtagagcccatcaggtggttgaagatggatatgaattttttgcaaagaggcagttggtcactctgttttctgcgcccaattattgcggagagtttgacaatgcaggtgccatgatgagtgtggatgaaacactaatgtgttcttttcagattttaaagcctgcagagaaaaagaagccaaatgccacgagacctgtaacgcctccaaggggtatgatcacaaagcaagcaaagaaatagatgtcgttttgacactgcctagtcgggacttgtaacatagagtatataaccttcatttttaagactgtaatgtgtactggtcagcttgctcagatagatctgtgtttgtgggggcccttccttccatttttgatttagtgaatggcatttgctggttataacagcaaatgaaagactcttcactccaaaaagaaaagtgttttgttttttaattctctgttccttttgcaaacaattttaatgatggtgttaaagctgtacaccccaggacagtttatcctgtctgaggagtaagtgtacaattgatcttttttaattcagtacaacccataatcatgtaaatgctcattttctttaggacataaagagagccctagggtgctctgaatctgtacatgttcttgtcataaaatgcatactgttgatacaaaccactgtgaacattttttatttgagaattttgtttcaaagggattgctttttcctctcattgtcttgttatgtacaaactagtttttatagctatcaacattaggagtaactttcaaccttgccagcatcactggtatgatgtatatttaattaaagcacacttttccccgaccgtatacttaaaatgacaaagccattcttttaaatatttgtgactctttcctaaagccaaagtttctgttgaattatgttttgacacacccctaagtacaaggtggtatggttgtatacacatgctgccttcttggggattcaaaaacaggtttttgattttgaatagcaattagtgatatagtgctgtttaagctactaacgataaaaggtaataacattttatacaatttccatatagtctattcattaagtaatctttttacagttgcatcaggcctgaacccgtccattcagaaagcttcaaattatagaaacaatactgttctatacgagtgaccgattatgctttctttggcctacattctttattctgcggtgaagttgaggcttataagttaaaacaaaggaactaacttactgtccaccagtttatacagaactcacagtacctatgacttttttaaactaagatctgttaaaaaagaaatctgtttcaacagatgaccgtgtacaataccgtgtggtgaaaat

SEQ ID NO: 208 - protein, 323 aa, Homo sapiens
  P36873
MADLDKLNIDSIIQRLLEVRGSKPGKNVQLQENEIRGLCLKSREIFLSQPILLELEAPLKICGDIHGQYYDLLRLFEYGGFPPESNYLFLGDYVDRGKQSLETICLLLAYKIKYPENFFLLRGNHECASINRIYGFYDECKRRYNIKLWKTFTDCFNCLPIAAIVDEKIFCCHGGLSPDLQSMEQIRRIMRPTDVPDQGLLCDLLWSDPDKDVLGWGENDRGVSFTFGAEVVAKFLHKHDLDLICRAHQVVEDGYEFFAKRQLVTLFSAPNYCGEFDNAGAMMSVDETLMCSFQILKPAEKKKPNATRPVTPPRGMITKQAKK

SEQ ID NO: 209 - DNA, 8460 bp, Homo sapiens
  U29344
  misc_feature (8148)..(8148): n is uncertain
cggccgtcgacacggcagcggccccggcctccctctccgccgcgcttcagcctcccgctccgccgcgctccagcctcgctctccgccgcccgcaccgccgcccgcgccctcaccagagcagccatggaggaggtggtgattgccggcatgtccgggaagctgccagagtcggagaacttgcaggagttctgggacaacctcatcggcggtgtggacatggtcacggacgatgaccgtcgctggaaggcggggctctacggcctgccccggcggtccggcaagctgaaggacctgtctaggtttgatgcctccttcttcggagtccaccccaagcaggcacacacgatggaccctcagctgcggctgctgctggaagtcacctatgaagccatcgtggacggaggcatcaacccagattcactccgaggaacacacactggcgtctgggtgggcgtgagcggctctgagacctcggaggccctgagccgagaccccgagacactcgtgggctacagcatggtgggctgccagcgagcgatgatggccaaccggctctccttcttcttcgacttcagagggcccagcatcgcactggacacagcctgctcctccagcctgatggccctgcagaacgcctaccaggccatccacagcgggcagtgccctgccgccatcgtggggggcatcaatgtcctgctgaagcccaacacctccgtgcagttcttgaggctggggatgctcagccccgagggcacctgcaaggccttcgacacagcggggaatgggtactgccgctcggagggtgtggtggccgtcctgctgaccaagaagtccctggcccggcgggtgtacgccaccatcctgaacgccggcaccaatacagatggcttcaaggagcaaggcgtgaccttcccctcaggggatatccaggagcagctcatccgctcgttgtaccagtcggccggagtggcccctgagtcatttgaatacatcgaagcccacggcacaggcaccaaggtgggcgacccccaggagctgaatggcatcacccgagccctgtgcgccacccgccaggagccgctgctcatcggctccaccaagtccaacatggggcacccggagccagcctcggggctggcagccctggccaaggtgctgctgtccctggagcacgggctctgggcccccaacctgcacttccatagccccaaccctgagatcccagcgctgttggatgggcggctgcaggtggtggaccagcccctgcccgtccgtggcggcaacgtgggcatcaactcctttggcttcgggggctccaacgtgcacatcatcctgaggcccaacacgcagccgccccccgcacccgccccacatgccaccctgccccgtctgctgcgggccagcggacgcacccctgaggccgtgcagaagctgctggagcagggcctccggcacagccaggacctggctttcctgagcatgctgaacgacatcgcgctgtccccgaccaccgccatgcccttccgtggctacgctgtgctgggtggtgagcgcggtggcccagaggtgcagcaggtgcccgctggcgagcgcccgctctggttcatctgctctgggatgggcacacagtggcgcgggatggggctgagcctcatgcgcctggaccgcttccgagattccatcctacgctccgatgaggctgtgaaccgattcggcctgaaggtgtcacagctgctgctgagcacagacgagagcacctttgatgacatcgtccattcgtttgtgagcctgactgccatccagataggcctcatagacctgctgagctgcatggggctgaggccagatggcatcgtcggccactccctgggggaggtggcctgtggctacgccgacggctgcctgtcccaggaggaggccgtcctcgctgcctactggaggggacagtgcatcaaagaagcccatctcccgccgggcgccatggcagccgtgggcttgtcctgggaggagtgtaaacagcgctgccccccggcggtggtgcccgcctgccacaactccaaggacacagtcaccatctcgggacctcaggccccggtgtttgagttcgtggagcagctgaggaaggagggtgtgtttgccaaggaggtgcggaccggcggtatggccttccactcctacttcatggaggccatcgcacccccactgctgcaggagctcaagaaggtgatccgggagccgaagccacgttcagcccgctggctcagcacctctatccccgaggcccagtggcacagcagcctggcacgcacgtcctccgccgagtacaatgtcaacaacctggtgagccctgtgctgttccaggaggccctgtggcacgtgcctgagcacgcggtggtgctggagatcgcgccccacgccctgctgcaggctgtcctgaagcgtggcctgaagccgagctgcaccatcatccccctgatgaagaaggatcacagggacaacctggagttcttcctggccggcatccggaggctgcacctctcaggcatcgacgccaaccccaatgccttgttcccacctgtggagttcccagctccccgaggaactcccctcatctccccactcatcaagtgggaccacagcctggcctgggacgtgccggccgccgaggacttccccaacggttcaggttccccctcagccgccatctacaacatcgacaccagctccgagtctcctgaccactacctggtggaccacaccctcgacggtcgcgtcctcttccccgccactggctacctgagcatagtgtggaagacgctggcccgacccctgggcctgggcgtcgagcagctgcctgtggtgtttgaggatgtggtgctgcaccaggccaccatcctgcccaagactgggacagtgtccctggaggtacggctcctggaggcctcccgtgccttcgaggtgtcagagaacggcaacctggtagtgagtgggaaggtgtaccagtgggatgaccctgaccccaggctcttcgaccacccggaaagccccacccccaaccccacggagcccctcttcctggcccaggctgaagtttacaaggagctgcgtctgcgtggctacgactacggccctcatttccagggcatcctggaggccagcctggaaggtgactcggggaggctgctgtggaaggataactgggtgagcttcatggacaccatgctgcagatgtccatcctgggctcggccaagcacggcctgtacctgcccacccgtgtcaccgccatccacatcgaccctgccacccacaggcagaagctgtacacactgcaggacaaggcccaagtggctgacgtggtggtgagcaggtggctgagggtcacagtggccggaggcgtccacatctccgggctccacactgagtcggccccgcggcggcagcaggagcagcaggtgcccatcctggagaagttttgcttcacttcccacacggaggaggggtgcctgtctgagcgcgctgccctgcaggaggagctgcaactgtgcaaggggctggtgcaggcactgcagaccaaggtgacccagcaggggctgaagatggtggtgcccggactggatggggcccagatcccccgggacccctcacagcaggaactgccccggctgttgtcggctgcctgcaggcttcagctcaacgggaacctgcagctggagctggcgcaggtgctggcccaggagaggcccaagctgccagaggaccctctgctcagcggcctcctggactccccggcactcaaggcctgcctggacactgccgtggagaacatgcccagcctgaagatgaaggtggtggaggtgctggccggccacggtcacctgtattcccgcatcccaggcctgctcagcccccatcccctgctgcagctgagctacacggccaccgaccgccacccccaggccctggaggctgcccaggccgagctgcagcagcacgacgttgcccagggccagtgggatcccgcagaccctgcccccagcgccctgggcagcgccgacctcctggtgtgcaactgtgctgtggctgccctcggggacccggcctcagctctcagcaacatggtggctgccctgagagaagggggctttctgctcctgcacacactgctccgggggcacccctcgggacatgtggccttcctcacctccactgagccgcagtatggccagggcatcctgagccaggacgcgtgggagagcctcttctccagggtgtccgtgcgcctggtgggcctgaagaagtccttctacggctccacgctcttcctgtgccgccggcccaccccgcaggacagccccatcttcctgccggtggacgataccagcttccgctgggtggagtctctgaagggcatcctggctgacgaagactcttcccggcctgtgtggctgaaggccatcaactgtgccacctcgggcgtggtgggcttggtgaactgtctccgccgagagcccggcggaacgctccggtgtgtgctgctctccaacctcagcagcacctcccacgtcccggaggtggacccgggctccgcagaactgcagaaggtgttgcagggagacctggtgatgaacgtctaccgcgacggggcctggggggctttccgccacttcctgctggaggaggacaagcctgaggagccgacggcacatgcctttgtgagcaccctcacccggggggacctgtcctccatccgctgggtctgctcctcgctgcgccatgcccagcccacctgccctggcgcccagctctgcacggtctactacgcctccctcaacttccgcgacatcatgctggccactggcaagctgtcccctgatgccatcccagggaagtggacctcccaggacagcctgctaggtatggagttctcgggccgagacgccagcggcaagcgtgtgatgggactggtgcctgccaagggcctggccacctctgtcctgctgtcaccggacttcctctgggatgtgccttccaactggacgctggaggaggcggcctcggtgcctgtcgtctacagcacggcctactacgcgctggtggtgcgtgggcgggtgcgccccggggagacgctgctcatccactcgggctcgggcggcgtgggccaggccgccatcgccatcgccctcagtctgggctgccgcgtcttcaccaccgtggggtcggctgagaagcgggcgtacctccaggccaggttcccccagctcgacagcaccagcttcgccaactcccgggacacatccttcgagcagcatgtgctgtggcacacgggcgggaagggcgttgacctggtcttgaactccttggcggaagagaagctgcaggccagcgtgaggtgcttggctacgcacggtcgcttcctggaaattggcaaattcgacctttctcagaaccacccgctcggcatggctatcttcctgaagaacgtgacattccacggggtcctactggatgcgttcttcaacgagagcagtgctgactggcgggaggtgtgggcgcttgtgcaggccggcatccgggatggggtggtacggcccctcaagtgcacggtgttccatggggcccaggtggaggacgccttccgctacatggcccaagggaagcacattggcaaagtcgtcgtgcaggtgcttgcggaggagccggaggcagtgctgaagggggccaaacccaagctgatgtcggccatctccaagaccttctgcccggcccacaagagctacatcatcgctggtggtctgggtggcttcggcctggagttggcgcagtggctgatacagcgtggggtgcagaagctcgtgttgacttctcgctccgggatccggacaggctaccaggccaagcaggtccgccggtggagggcccagggcgtacaggtgcaggtgtccaccagcaacatcagctcactggagggggcccggggcctcattgccgaggcggcgcagcttgggcccgtgggcggcgtcttcaacctggccgtggtcttgagagatggcttgctggagaaccagaccccagagttcttccaggacgtctgcaagcccaagtacagcggcaccctgaacctggacagggtgacccgagaggcgtgccctgagctggactactttgtggtcttctcctctgtgagctgcgggcgtggcaatgcgggacagagcaactacggctttgccaattccgccatggagcgtatctgtgagaaacgccggcacgaaggcctcccaggcctggccgtgcagtggggcgccatcggcgacgtgggcattttggtggagacgatgagcaccaacgacacgatcgtcagtggcacgctgccccaggccatggcgtcctgcctggaggtgctggacctcttcctgaaccagccccacatggtcctgagcagctttgtgctggctgagaaggctgcggcctatagggacagggacagccagcgggacctggtggaggccgtggcacacatcctgggcatccgcgacttggctgctgtcaacctggacagctcactggcggacctgggcctggactcgctcatgagcgtggaggtgcgccagacgctggagcgtgagctcaacctggtgctgtccgtgcgcgaggtgcggcaactcacgctccggaaactgcaggagctgtcctcaaaggcggatgaggccagcgagctggcatgccccacgcccaaggaggatggtctggcccagcagcagactcagctgaacctgcgctccctgctggtgaacccggagggccccaccctgatgcggctcaactccgtgcagagctcggagcggcccctgttcctggtgcacccaatcgagggctccaccaccgtgttccacagcctggcctcccggctcagcatccccacctatggcctgcagtgcacccgagctgcgccccttgacagcatccacagcctggctgcctactacatcgactgcatcaggcaggtgcagcccgagggcccctaccgcgtggccggctactcctacggggcctgcgtggcctttgaaatgtgctcccagctgcaggcccagcagagcccagcccccacccacaacagcctcttcctgttcgacggctcgcccacctacgtactggcctacacccagagctaccgggcaaagctgaccccaggctgtgaggctgaggctgagacggaggccatatgcttcttcgtgcagcagttcacggacatggagcacaacagggtgctggaggcgctgctgccgctgaagggcctagaggagcgtgtggcagccgccgtggacctgatcatcaagagccaccagggcctggaccgccaggagctgagctttgcggcccggtccttctactacaagctcggtgccgctgagcagtacacacccaaggccaagtaccatggcaacgtgatgctactgcgcgccaagacgggtggcgcctacggcgaggacctgggcgcggattacaacctctcccaggtatgcgacgggaaagtatccgtccacgtcatcgagggtgaccaccgcacgctgctggagggcagcggcctggagtccatcatcagcatcatccacagctccctggctgagccacgcgtgagcgtgcgggagggctaggcccgtgcccccgcctgccaccggaggtcactccaccatccccaccccaccccaccccacccccgccatgcaacgggattgaagggtcctgccggtgggaccctgtccggcccagtgccactgccccccgaggctgctagatgtaggtgttaggcatgtcccacccacccgccgcctcccacggcacctcggggacaccagagctgccgacttggagactcctggtctgtgaagagccggtggtgcccgttcccgcaggaactgggctgggcctcgtgcgcccgtggggtctgcgcttggtctttctgtgcttggatttgcatatttattgcattgctggtagagacccccaggcctgtccaccctgccaagactcctcaggcagcgtgtgggtcccgcactctgcccccatttccccgatgtcccctgcgggcgcgggcagccacccaagcctgctggctgcggccccctctcggccaggcattggctcagccngctgagtggggggtcgtgggccagtccccgaggagctgggcccctgcacaggcacacagggcccggccacacccagcggccccccgcacagccacccgtggggtgctgcccttatcgcccggcgccgggcaccaactccatgtttggtgtttgtctgtgtttgtttttcaagaaatgattcaaattgctgcttggattttgaaatttactgtaactgtcagtgtacacgtctggaccccgtttcatttttacaccaatttggtaaaaatgctgctctcagcctcccacaattaaaccgcatgtgatctcccc

SEQ ID NO: 210 - protein, 2509 aa, Homo sapiens [sequence omitted]

SEQ ID NO: 211 - DNA, 5234 bp, Homo sapiens
  AB025194
tggctgagccagcagctgcagcagctgcgggagtggccgggtggccggcgggtgccagccgccatggaggccgtgccccgcatgcccatgatctggctggacctgaaggaggccggtgactttcacttccagccagctgtgaagaagttcgtcctgaagaattatggagagaacccagaagcctacaatgaagaactgaagaagctggagttgctcagacagaatgctgtccgtgtcccacgagactttgagggctgtagtgtcctccgcaagtacctcggccagcttcattacctgcagagtcgggtccccatgggctcgggccaggaggccgctgtccctgtcacctggacagagatcttctcaggcaagtctgtggcccatgaggacatcaagtacgagcaggcctgtattctctacaaccttggagcgctgcactccatgctgggggccatggacaagcgggtgtctgaggagggcatgaaggtctcctgtacccatttccagtgcgcagccggcgccttcgcctacctacgggagcacttccctcaagcctacagcgtcgacatgagccgccagatccttacgctcaacgtcaacctcatgctgggccaggctcaggagtgcctcctggagaagtcgatgttggacaacaggaagagctttctggtggcccgcatcagtgcacaggtggtagattactacaaggaggcatgccgggccttggagaaccccgacactgcctcactgctgggccggatccagaaggactggaagaaacttgtgcagatgaagatctactacttcgcagccgtggctcatctgcacatgggaaagcaggccgaggagcagcagaagttcggggagcgggttgcatacttccagagcgccctggacaagctcaatgaagccatcaagttggccaagggccagcctgacactgtgcaagacgcgcttcgcttcactatggatgtcattgggggaaagtacaattctgccaagaaggacaacgacttcatttaccatgaggctgtcccagcattggacacccttcagcctgtaaaaggagcccccttggtgaagcccttgccagtgaaccccacagacccagctgttacaggccctgacatctttgccaaactggtacccatggctgcccacgaggcctcgtcactgtacagtgaggagaaggccaagctgctccgggagatgatggccaagattgaggacaagaatgaggtcctggaccagttcatggattcaatgcagttggatcccgagacggtggacaaccttgatgcctacagccacatcccaccccagctcatggagaagtgcgcggctctcagcgtccggcccgacactgtcaggaaccttgtacagtccatgcaagtgctgtcaggtgtgttcacggatgtggaggcttccctgaaggacatcagagatctgttggaggaggatgagctgctagagcagaagtttcaggaggcggtgggccaggcaggggccatctccatcacctccaaggctgagctggcagaggtgaggcgagaatgggccaagtacatggaagtccatgagaaggcctccttcaccaacagtgagctgcaccgtgccatgaacctgcacgtcggcaacctgcgcctgctcagcgggccgcttgaccaggtccgggctgccctgcccacaccggccctctccccagaggacaaggccgtgctgcaaaacctaaagcgcatcctggctaaggtgcaggagatgcgggaccagcgcgtgtccctggagcagcagctgcgtgagcttatccagaaagatgacatcactgcctcgctggtcaccacagaccactcagagatgaagaagttgttcgaggagcagctgaaaaagtatgaccagctgaaggtgtacctggagcagaacctggccgcccaggaccgtgtcctctgtgcactgacagaggccaacgtgcagtacgcagccgtgcggcgggtactcagcgacttggaccaaaagtggaactccacgctgcagaccctggtggcctcgtatgaagcctatgaggacctgatgaagaagtcgcaggagggcagggacttctacgcagatctggagagcaaggtggctgctctgctggagcgcacgcagtccacctgccaggcccgcgaggctgcccgccagcagctcctggacagggagctgaagaagaagccgccgccacggcccacagccccaaagccgctgctgccccgcagggaggagagtgaggcagtggaagcaggagacccccctgaggagctgcgcagcctcccccctgacatggtggctggcccacgactgcctgacaccttcctgggaagtgccaccccgctccactttcctcccagccccttccccagctccacaggcccaggaccccactatctctcaggccccttgccccctggtacctactcgggccccacccagctgatacagcccagggccccagggccccatgcaatgcccgtagcacctgggcctgccctctacccagcccctgcatacacaccggagctgggccttgtgccccgatcctccccacagcatggcgtggtgagcagtccctatgtgggggtagggccggccccaccagttgcaggtctcccctcggccccacctcctcaattctcaggccccgagttggccatggcggttcggccagccaccaccacagtagatagcatccaggcgcccatccccagccacacagccccacggccaaaccccacccctgctcctcccccgccctgcttccctgtgcccccaccgcagccactgcccacgccttacacctaccctgcaggggctaagcaacccatcccagcacagcaccacttctcttctgggatccccgcaggttttccagccccaaggattgggccccagccccagccccatcctcagccccatccttcacaagcgtttgggcctcagcccccacagcagccccttccactccagcatccacatctcttcccaccccaggccccaggactcctacccccacaatccccctacccctatgcccctcagcctggggtcctggggcagccgccaccccccctacacacccagctctacccaggtcccgctcaagaccctctgccagcccactcaggggctctgcctttccccagccctgggccccctcagcctccccatcccccactggcatatggtcctgccccttctaccagacccatgggcccccaggcagcccctcttaccattcgagggccctcgtctgctggccagtccacccctagtccccacctggtgccttcacctgccccatctccagggcctggtccggtaccccctcgccccccagcagcagaaccacccccttgcctgcgccgaggcgccgcagctgcagacctgctctcctccagcccggagagccagcatggcggcactcagtctcctgggggtgggcagcccctgctgcagcccaccaaggtggatgcagctgagggtcgtcggccgcaggccctgcggctgattgagcgggacccctatgagcatcctgagaggctgcggcagttgcagcaggagctggaggcctttcggggtcagctgggggatgtgggagctctggacactgtctggcgagagctgcaagatgcgcaggaacatgatgcccgaggccgttccatcgccattgcccgctgctactcactgaagaaccggcaccaggatgtcatgccctatgacagtaaccgtgtggtgctgcgctcaggcaaggatgactacatcaatgccagctgcgtggaggggctctccccatactgccccccgctagtggcaacccaggccccactgcctggcacagctgctgacttctggctcatggtccatgagcagaaagtgtcagtcattgtcatgctggtttctgaggctgagatggagaagcaaaaagtggcacgctacttccccaccgagaggggccagcccatggtgcacggtgccctgagcctggcattgagcagcgtccgcagcaccgaaacccatgtggagcgcgtgctgagcctgcagttccgagaccagagcctcaagcgctctcttgtgcacctgcacttccccacttggcctgagttaggcctgcccgacagccccagcaacttgctgcgcttcatccaggaggtgcacgcacattacctgcatcagcggccgctgcacacgcccatcattgtgcactgcagctctggtgtgggccgcacgggagcctttgcactgctctatgcagctgtgcaggaggtggaggctgggaacggaatccctgagctgcctcagctggtgcggcgcatgcggcagcagagaaagcacatgctgcaggagaagctgcacctcaggttctgctatgaggcagtggtgagacacgtggagcaggtcctgcagcgccatggtgtgcctcctccatgcaaacccttggccagtgcaagcatcagccagaagaaccaccttcctcaggactcccaggacctggtcctcggtggggatgtgcccatcagctccatccaggccaccattgccaagctcagcattcggcctcctggggggttggagtccccggttgccagcttgccaggccctgcagagcccccaggcctcccgccagccagcctcccagagtctaccccaatcccatcttcctccccaccccccctttcctccccactacctgaggctccccagcctaaggaggagccgccagtgcctgaagcccccagctcggggcccccctcctcctccctggaattgctggcctccttgaccccagaggccttctccctggacagctccctgcggggcaaacagcggatgagcaagcataactttctgcaggcccataacgggcaagggctgcgggccacccggccctctgacgaccccctcagccttctggatccactctggacactcaacaagacctgaacaggttttgcctacctggtccttacactacatcatcatcatctcatgcccacctgcccacacccagcagagcttctcagtgggcacagtctcttactcccatttctgctgcctttggccctgcctggcccagcctgcacccctgtggggtggaaatgtactgcaggctctgggtcaggttctgctcctttatgggacccgacatttttcagctctttgctattgaaataataaaccaccctgttctgtgaaaaaaaaaa

SEQ ID NO: 212 - protein, 1636 aa, Homo sapiens
  Q9H3S7
MEAVPRMPMIWLDLKEAGDFHFQPAVKKFVLKNYGENPEAYNEELKKLELLRQNAVRVPRDFEGCSVLRKYLGQLHYLQSRVPMGSGQEAAVPVTWTEIFSGKSVAHEDIKYEQACILYNLGALHSMLGAMDKRVSEEGMKVSCTHFQCAAGAFAYLREHFPQAYSVDMSRQILTLNVNLMLGQAQECLLEKSMLDNRKSFLVARISAQVVDYYKEACRALENPDTASLLGRIQKDWKKLVQMKIYYFAAVAHLHMGKQAEEQQKFGERVAYFQSALDKLNEAIKLAKGQPDTVQDALRFTMDVIGGKYNSAKKDNDFIYHEAVPALDTLQPVKGAPLVKPLPVNPTDPAVTGPDIFAKLVPMAAHEASSLYSEEKAKLLREMMAKIEDKNEVLDQFMDSMQLDPETVDNLDAYSHIPPQLMEKCAALSVRPDTVRNLVQSMQVLSGVFTDVEASLKDIRDLLEEDELLEQKFQEAVGQAGAISITSKAELAEVRREWAKYMEVHEKASFTNSELHRAMNLHVGNLRLLSGPLDQVRAALPTPALSPEDKAVLQNLKRILAKVQEMRDQRVSLEQQLRELIQKDDITASLVTTDHSEMKKLFEEQLKKYDQLKVYLEQNLAAQDRVLCALTEANVQYAAVRRVLSDLDQKWNSTLQTLVASYEAYEDLMKKSQEGRDFYADLESKVAALLERTQSTCQAREAARQQLLDRELKKKPPPRPTAPKPLLPRREESEAVEAGDPPEELRSLPPDMVAGPRLPDTFLGSATPLHFPPSPFPSSTGPGPHYLSGPLPPGTYSGPTQLIQPRAPGPHAMPVAPGPALYPAPAYTPELGLVPRSSPQHGVVSSPYVGVGPAPPVAGLPSAPPPQFSGPELAMAVRPATTTVDSIQAPIPSHTAPRPNPTPAPPPPCFPVPPPQPLPTPYTYPAGAKQPIPAQHHFSSGIPAGFPAPRIGPQPQPHPQPHPSQAFGPQPPQQPLPLQHPHLFPPQAPGLLPPQSPYPYAPQPGVLGQPPPPLHTQLYPGPAQDPLPAHSGALPFPSPGPPQPPHPPLAYGPAPSTRPMGPQAAPLTIRGPSSAGQSTPSPHLVPSPAPSPGPGPVPPRPPAAEPPPCLRRGAAAADLLSSSPESQHGGTQSPGGGQPLLQPTKVDAAEGRRPQALRLIERDPYEHPERLRQLQQELEAFRGQLGDVGALDTVWRELQDAQEHDARGRSIAIARCYSLKNRHQDVMPYDSNRVVLRSGKDDYINASCVEGLSPYCPPLVATQAPLPGTAADFWLMVHEQKVSVIVMLVSEAEMEKQKVARYFPTERGQPMVHGALSLALSSVRSTETHVERVLSLQFRDQSLKRSLVHLHFPTWPELGLPDSPSNLLRFIQEVHAHYLHQRPLHTPIIVHCSSGVGRTGAFALLYAAVQEVEAGNGIPELPQLVRRMRQQRKHMLQEKLHLRFCYEAVVRHVEQVLQRHGVPPPCKPLASASISQKNHLPQDSQDLVLGGDVPISSIQATIAKLSIRPPGGLESPVASLPGPAEPPGLPPASLPESTPIPSSSPPPLSSPLPEAPQPKEEPPVPEAPSSGPPSSSLELLASLTPEAFSLDSSLRGKQRMSKHNFLQAHNGQGLRATRPSDDPLSLLDPLWTLNKT

SEQ ID NO: 213 - DNA, 2399 bp, Homo sapiens
  M27507
gcgaagcggccggcctgggcgccgactgcagagccgggaggctggtggtcatgccggggttcctggttcgcatcctccttctgctgctggttctgctgcttctgggccctacgcgcggcttgcgcaatgccacccagaggatgtttgaaattgactatagccgggactccttcctcaaggatggccagccatttcgctacatctcaggaagcattcactactcccgtgtgccccgcttctactggaaggaccggctgctgaagatgaagatggctgggctgaacgccatccagacgtatgtgccctggaactttcatgagccctggccaggacagtaccagttttctgaggaccatgatgtggaatattttcttcggctggctcatgagctgggactgctggttatcctgaggcccgggccctacatctgtgcagagtgggaaatgggaggattacctgcttggctgctagagaaagagtctattcttctccgctcctccgacccagattacctggcagctgtggacaagtggttgggagtccttctgcccaagatgaagcctctcctctatcagaatggagggccagttataacagtgcaggttgaaaatgaatatggcagctactttgcctgtgattttgactacctgcgcttcctgcagaagcgctttcgccaccatctgggggatgatgtggttctgtttaccactgatggagcacataaaacattcctgaaatgtggggccctgcagggcctctacaccacggtggactttggaacaggcagcaacatcacagatgctttcctaagccagaggaagtgtgagcccaaaggacccttgatcaattctgaattctatactggctggctagatcactggggccaacctcactccacaatcaagaccgaagcagtggcttcctccctctatgatatacttgcccgtggggcgagtgtgaacttgtacatgtttataggtgggaccaattttgcctattggaatggggccaactcaccctatgcagcacagcccaccagctacgactatgatgccccactgagtgaggctggggacctcactgagaagtattttgctctgcgaaacatcatccagaagtttgaaaaagtaccagaaggtcctatccctccatctacaccaaagtttgcatatggaaaggtcactttggaaaagttaaagacagtgggagcagctctggacattctgtgtccctctgggcccatcaaaagcctttatcccttgacatttatccaggtgaaacagcattatgggtttgtgctgtaccggacaacacttcctcaagattgcagcaacccagcacctctctcttcacccctcaatggagtccacgatcgagcatatgttgctgtggatgggatcccccagggagtccttgagcgaaacaatgtgatcactctgaacataacagggaaagctggagccactctggaccttctggtagagaacatgggacgtgtgaactatggtgcatatatcaacgattttaagggtttggtttctaacctgactctcagttccaatatcctcacggactggacgatctttccactggacactgaggatgcagtgcgcagccacctggggggctggggacaccgtgacagtggccaccatgatgaagcctgggcccacaactcatccaactacacgctcccggccttttatatggggaacttctccattcccagtgggatcccagacttgccccaggacacctttatccagtttcctggatggaccaagggccaggtctggattaatggctttaaccttggccgctattggccagcccggggccctcagttgaccttgtttgtgccccagcacatcctgatgacctcggccccaaacaccatcaccgtgctggaactggagtgggcaccctgcagcagtgatgatccagaactatgtgctgtgacgttcgtggacaggccagttattggctcatctgtgacctacgatcatccctccaaacctgttgaaaaaagactcatgcccccacccccgcaaaaaaacaaagattcatggctggaccatgtatgatgatgaaagcctgtgtctttgagggattctaccctgaacatacctcacagatcctccctgtcatgccacatttcactgattggaatgtggaaatggaaaaggaatttaggatgtgcattttcacctgaggtttccctgcatccctgcagtgccaaagccccaccttcagggaccacctggaatgtgtgagggctgacagcacagtaacgtgcatacatatctgcagggctggaatggaagctttaaaggtggtagtgatttttattttggaagaatcatgttacctttttgttaaataaaatttgtactcaaatg

SEQ ID NO: 214 - protein, 677 aa, Homo sapiens
  P16278
MPGFLVRILLLLLVLLLLGPTRGLRNATQRMFEIDYSRDSFLKDGQPFRYISGSIHYSRVPRFYWKDRLLKMKMAGLNAIQTYVPWNFHEPWPGQYQFSEDHDVEYFLRLAHELGLLVILRPGPYICAEWEMGGLPAWLLEKESILLRSSDPDYLAAVDKWLGVLLPKMKPLLYQNGGPVITVQVENEYGSYFACDFDYLRFLQKRFRHHLGDDVVLFTTDGAHKTFLKCGALQGLYTTVDFGTGSNITDAFLSQRKCEPKGPLINSEFYTGWLDHWGQPHSTIKTEAVASSLYDILARGASVNLYMFIGGTNFAYWNGANSPYAAQPTSYDYDAPLSEAGDLTEKYFALRNIIQKFEKVPEGPIPPSTPKFAYGKVTLEKLKTVGAALDILCPSGPIKSLYPLTFIQVKQHYGFVLYRTTLPQDCSNPAPLSSPLNGVHDRAYVAVDGIPQGVLERNNVITLNITGKAGATLDLLVENMGRVNYGAYINDFKGLVSNLTLSSNILTDWTIFPLDTEDAVRSHLGGWGHRDSGHHDEAWAHNSSNYTLPAFYMGNFSIPSGIPDLPQDTFIQFPGWTKGQVWINGFNLGRYWPARGPQLTLFVPQHILMTSAPNTITVLELEWAPCSSDDPELCAVTFVDRPVIGSSVTYDHPSKPVEKRLMPPPPQKNKDSWLDHV

SEQ ID NO: 215 - DNA, 1254 bp, Homo sapiens
  L04685
atgggcgacaaagggacgcgggtgttcaagaaggccagtccaaatggaaagctcaccgtctacctgggaaagcgggactttgtggaccacatcgacctcgtggaccctgtggatggtgtggtcctggtggatcctgagtatctcaaagagcggagagtctatgtgacgctgacctgcgccttccgctatggccgggaggacctggatgtcctgggcctgacctttcgcaaggacctgtttgtggccaacgtacagtcgttcccaccggcccccgaggacaagaagcccctgacgcggctgcaggaacgcctcatcaagaagctgggcgagcacgcttaccctttcacctttgagatccctccaaaccttccatgttctgtgacactgcagccggggcccgaagacacggggaaggcttgcggtgtggactatgaagccaaagccttctgcgcggagaatttggaggagaagatccacaagcggaattctgtgggtctggtcatccggaaggttcagtatgccccagagaggcctggcccccagcccacagccgagaccaccaggcagttcctcatgtcggacaagcccttgcacctagaagcctctctggataaggagatctattaccatggagaacccatcagcgtcaacgtccacgtcaccaacaacaccaacaagacggtggagaagatcaagatctcagtgcgccagtatgcagacatctgccttttcaacacagctcagtacaagtgccctgttgccatggaagaggctgatgacactgtggcacccagctcgacgttctgcaaggtctacacactgacccccttcctagccaataaccgagagaagcggggcctcgccttggacgggaagctcaagcacgaagacacgaacttggcctctagcaccctgttgagggaaggtgccaaccgtgagatcctggggatcattgtttcctacaaagtgaaagtgaagctggtggtgtctcggggcggcctgttgggagatcttgcatccagcgacgtggccgtggaactgcccttcaccctaatgcaccccaagcccaaagaggaacccccgcatcgggaagttccagagaacgagacgccagtagataccaatctcatagaacttgacacaaatgatgacgacattgtatttgaggactttgctcgccagagactgaaaggcatggaggatgacaaggaggaagaggaggatggtaccggctctccgcggctcaacgacaga

SEQ ID NO: 216 - protein, 418 aa, Homo sapiens
  P49407
MGDKGTRVFKKASPNGKLTVYLGKRDFVDHIDLVDPVDGVVLVDPEYLKERRVYVTLTCAFRYGREDLDVLGLTFRKDLFVANVQSFPPAPEDKKPLTRLQERLIKKLGEHAYPFTFEIPPNLPCSVTLQPGPEDTGKACGVDYEVKAFCAENLEEKIHKRNSVRLVIRKVQYAPERPGPQPTAETTRQFLMSDKPLHLEASLDKEIYYHGEPISVNVHVTNNTNKTVKKIKISVRQYADICLFNTAQYKCPVAMEEADDTVAPSSTFCKVYTLTPFLANNREKRGLALDGKLKHEDTNLASSTLLREGANREILGIIVSYKVKVKLVVSRGGLLGDLASSDVAVELPFTLMHPKPKEEPPHREVPENETPVDTNLIELDTNDDDIVFEDFARQRLKGMKDDKEEEEDGTGSPQLNNR

SEQ ID NO: 217 - DNA, 1510 bp, Homo sapiens
  BC002731
ggcacgaggcccaagcaggtcggcggcggcggcaggagagcggccgggcgtcagctcctcgacccccgtgtcgggctagtccagcgaggcggacgggcggcgtgggcccatggccaggcccggcatggagcggtggcgcgaccggctggcgctggtgacgggggcctcggggggcatcggcgcggccgtggcccgggccctggtccagcagggactgaaggtggtgggctgcgcccgcactgtgggcaacatcgaggagctggctgctgaatgtaagagtgcaggctaccccgggactttgatcccctacagatgtgacctatcaaatgaagaggacatcctctccatgttctcagctatccgttctcagcacagcggtgtagacatctgcatcaacaatgctggcttggcccggcctgacaccctgctctcaggcagcaccagtggttggaaggacatgttcaatgtgaacgtgctggccctcagcatctgcacacgggaagcctaccagtccatgaaggagcggaatgtggacgatgggcacatcattaacatcaatagcatgtctggccaccgagtgttacccctgtctgtgacccacttctatagtgccaccaagtatgccgtcactgcgctgacagagggactgaggcaagagcttcgggaggcccagacccacatccgagccacgtgcatctctccaggtgtggtggagacacaattcgccttcaaactccacgacaaggaccctgagaaggcagctgccacctatgagcaaatgaagtgtctcaaacccgaggatgtggccgaggctgttatctacgtcctcagcacccccgcacacatccagattggagacatccagatgaggcccacggagcaggtgacctagtgactgtgggagctcctccttccctccccacccttcatggcttgcctcctgcctctggattttaggtgttgatttctggatcacgggataccacttcctgtccacaccccgaccaggggctagaaaatttgtttgagatttttatatcatcttgtcaaattgcttcagttgtaaatgtgaaaaatgggctggggaaaggaggtggtgtccctaattgttttacttgttaacttgttcttgtgcccctgggcacttggcctttgtctgctctcagtgtcttccctttgacatgggaaaggagttgtggccaaaatccccatcttcttgcacctcaacgtctgtggctcagggctggggtggcagagggaggccttcaccttatatctgtgttgttatccagggctccagacttcctcctctgcctgccccactgcaccctctcccccttatctatctccttctcggctccccagcccagtcttggcttcttgtcccctcctggggtcatccctccactctgactctgactatggcagcagaacaccagggcctggcccagtggatttcatggtgatcattaaaaaagaaaaatcgcaaccaaaaaaaaaaaaaaaaaaa

SEQ ID NO: 218 - protein, 181 aa, Homo sapiens
  Q9BUC7
MFSAIRSQHSGVDICINNAGLARPDTLLSGSTSGWKDMFNVNVLALSICTREAYQSMKERNVDDGHIININSMSGHRVLPLSVTHFYSATKYAVTALTEGLRQELREAQTHIRATCISPGVVETQFAFKLHDKDPEKAAATYEQMKCLKPEDVAEAVIYVLSTPAHIQIGDIQMRPTEQVT

SEQ ID NO: 219 - DNA, 5687 bp, Homo sapiens
  AB014559
ggccttggggagcccaggatggaggtggcggtcgcggcggcgggccgagccctgcggcgggcgggaggaggtgagcaccaggcccactgagcctctgcagagccaccagccatgcccgggatcgtggtgttccggcggcgctggtctgtgggcagtgatgacctcgtcctaccagccatcttcctctttctcctgcataccacctggtttgtgatcctgtccgtggtgctcttcggcctggtctataacccgcacgaggcctgctccctgaacctggtggaccacggccgcggctacctgggcatcctgctgagctgcatgatcgctgagatggccatcatctggctgagcatgcgcgggggcatcctctacacggagccccgtgactccatgcagtacgtgctctacgtgcgcctggccatcctggtgatcgagttcatctacgccatcgtgggcatcgtctggctcactcagtactacacctcctgcaacgacctcactgccaagaatgtcaccctcggaatggttgtctgcaactgggtagtcatcctcagtgtgtgcatcactgtcctctgcgtcttcgaccccacgggccgcacctttgtcaagctgagagccaccaagaggaggcagcgtaacctgcggacctacaacctgcggcaccgcttagaggagggtcaagccaccagctggtcgcgccggctcaaagtgttcctctgctgcacgcggacgaaggactcccagtcagatgcctactcagaaatcgcctacctctttgcggagttcttccgggaccttgacattgtgccatccgacatcattgctggcctggtgctgctccggcagcggcagcgggccaagcgcaacgccgtgctggacgaggcaaacaatgacatcttggccttcctgtctgggatgccggtgaccagaaacaccaagtacctcgacctcaagaattcacaagagatgctccgctacaaagaggtctgctactacatgctctttgccctggctgcctacgggtggcccatgtacctgatgcggaagcccgcctgcggcctctgccaactggctcggtcctgctcgtgttgcctgtgtcctgcgaggccgcggttcgcccctggagtcaccatcgaggaagacaactgctgtggctgtaatgccattgccatccggcgccacttcctggacgagaacatgactgcggtggacatcgtctatacctcctgccatgatgcggtctatgaaacgcccttctacgtggcggtggaccatgacaagaagaaagtggtgatcagtatccgggggaccctgtcccccaaggatgccctgactgacctgacgggtgatgctgagcgcctccccgtggaggggcaccacggcacctggctgggccacaagggtatggtcctctcagctgagtacatcaagaagaaactggagcaggagatggtcctgtcccaggcctttgggcgagacctgggccgcggaaccaaacactacggcctgattgtggtgggccactccctgggcgcgggcactgctgccatcctctccttccttctgcgcccacagtatccgaccctcaagtgctttgcctactccccgccagggggcctgctgagtgaggatgcaatggagtattccaaggagttcgtgactgctgtggttctgggcaaagacctcgtccccaggattggcctctctcagctggaaggcttccgcagacagctcctggatgtcctgcagcgaagcaccaagcccaaatggcggatcatcgtgggggccaccaaatgcatccccaagtcggagctgcctgaggaggtagaggtgaccaccctggccagcacgcggctctggacccaccccagcgacctaactatagccctctcagccagcactccactctacccgcccggccgcatcatccacgtggtccacaaccaccctgcagagcagtgctgctgctgtgagcaggaggagcccacatactttgccatctggggcgacaacaaggccttcaatgaggtgatcatctcgccagccatgctgcatgagcacctgccctatgtggtcatggaggggctcaacaaggtgctggagaactacaacaaggggaagaccgctctgctctctgcagccaaggtcatggtgagccctaccgaggtggacctgactcctgagctcatcttccagcagcagccactccccacggggccgcccatgcccactggccttgccctggagctgccgactgcagaccaccgcaacagcagcgtcaggagcaagtcccagtctgagatgagcctggagggcttctcggaggggcggctgctgtcgccagtggttgcggcggcggcccgccaggacccggtggagctgctgctgctgtctacccaggagcggctggcggcggagctgcaggcccggcgggcaccactggccaccatggagagcctctcggacactgagtccctgtacagcttcgactcgcgccgctcctcaggcttccgcagcatccggggctcccccagcctccacgctgtgctggagcgtgatgaaggccacctcttctacattgaccctgccatccccgaggaaaacccatccctgagctcgcgcactgagctgctggcggccgacagcctgtccaagcactcacaggacacgcagcccctggaggcggccctgggcagtggcggcgtcactcctgagcggccccccagtgctgcggccaatgacgaggaggaagaggttggcggtgggggtggcgggccggcctcccgcggggagctggcgctgcacaatgggcgcctgggggactcgcccagtcctcaggtgctggaattcgccgagttcatcgacagcctcttcaacctggacagcaagagcagctccttccaagacctctactgcatggtggtgcccgagagccccaccagtgactacgctgagggccccaagtcccccagccagcaagagatcctgctccgtgcccagttcgagcccaacctggtgcccaagcccccacggctctttgccggctcagccgacccctcctcgggcatctcactctcgccctccttcccgctcagctcctcgggtgagctcatggacctgacgcccacgggcctcagtagccaggaatgcctggcggctgacaagatccggacttctacccccactggccacggagccagccccgccaagcaagatgagctggtcatctcagcacgctagcaccccagttgcgtggccagccgggcccaggcaggagcaggtggccctgtgggcacctggtgcctgccccctgccgggcagctttaaggacagacccccaggggcagtttagcctcaggcacaggcatcgctgctgagctgggggtccgcatccctacctcagcttaggacccccagagccaaggtggctgggatctggccccacagatggggaaagatggggaagggtgtggagtggggaggagcctgggcagcctgctgggtgggccacactcagcctgactgccctccatgggggcattctggcaccccctgctccaggacaggccatgggcaagctgcctcccatcactgcctgctggctgctctcccaggggccaggtgtgaagagcagtgccccccgacacatgtattctcatctgtggtccaggccggcatcgtcctggccaccccccagatctggtgcctgctggccggccccctggggtgcccctgccgaggtggcctgcagtgctgtacatgtttacagaagctgctgggcttggctcaggatgtgttctgggcttgcaagccccccgcccaatcatgtgttcagtagccgtcctctgagcagggcccaaggcagccaggggcctggaggggccagaggagggtggggtcagggccgccccttctctgccttgtgcctctcatgctgcctcctctgcccatgggtcctgggcacccaggcctgccctgcctgctggctacttcctggcttaccttctacccccaaggatcctcaccacccaaagggtggtgggcactgctgtgaccaccccagctgcagagtcagtgccctgggtggaaggaaggcactgagagcccccttcctctgagggccccacctcaccccttggtgtcacccccaccacgcctaggcagctctgggccctgggatctggaaccaacacacccctgttcccctcagctttccctcctcgctggcctgggcaccctcctgggagcaggccttcctccctcccacccccaatgtcctgttggtaggaggtggggccaagagtggggtatggtgggccttggctggagacctctgtccactgcccagggaggggcctggggctgggagcagtcccggtttagcctgaggtccccatagggcttcctcccctgctgggtttgggaagcagttagggagatagcgacccggagtttccccagaagcggggtgggagggtgtgcatgctagtgttggcgcgtatgcatgtgcatgagtgtgcaccgttcctaaggaaggggcctctggggctgcccaccctacctgccctgcctgcctgctgcccctcccagcctgccaagaaaacggtaggggagcatgatggggcctttgaggcagggtcgcagggacaagctcagctttaggcaccatctgttcccatcacgcctgctgctgtgacccgttttggaaaactggtgtgtaccgaggcgctgactgcacggctgaccgcctgctcgtgccttcattctgcagcggcatggtccctcccattctggctccacctgcagcctccctgggtggcctaggctcccccgaccaagagacctccctctcatgatcactggtacctgggggcctgaattctggcccccggctccccacacagctgggactggcctggatggctgtcctgggagcccctgcccaccctgacggagctgggcctcccctcatcctctgtaactcccgccttcaccagactcaaggacaccctggccctgctgaggcatacagagcttcagcccagcacagaagcaagacaaaatcagtggctcttagagtttagaaaacaagacagactctcagatgaaagatctgacaagcaccgtggccagtcacagggagagacttgatgtctggccttttaattcctcctctgccagggtgggtcctgggacctctaatgtgggcatgtcgtccaccccaggacgagccatcagggacagaccccccacccccaaggctgcagccacaccatgtttcaggcttggggctggggcaggcttgggctcaatcctgggcacccaggggcagcccacccctaacctggctcctacccaccttgcccttgaaggatgggcctgctgcacgtctccctcctccaccccataccacactggggggtctgagccacccccctcagccccgttcggctcagaccgacccccactccatccccagacctgcagcacaagtgcgcgggcctgtcctcccaggggcctgggcgactccatatgcaatcagtagcgagcagccgggccccacagaccctcatgcactctcttacgtgccattctccccagactttttttgtacttaatgtatgaaagatccaaactaatattgctgtaaaaaggagagacaaattaatatagcttattctataaat

SEQ ID NO: 220 - protein, 1049 aa, Homo sapiens
  Q9Y4D2; BAA31634
ASAEPPAMPGIVVFRRRWSVGSDDLVLPAIFLFLLHTTWFVILSVVLFGLVYNPHEACSLNLVDHGRGYLGILLSCMIAEMAIIWLSMRGGILYTEPRDSMQYVLYVRLAILVIEFIYAIVGIVWLTQYYTSCNDLTAKNVTLGMVVCNWVVILSVCITVLCVFDPTGRTFVKLRATKRRQRNLRTYNLRHRLEEGQATSWSRRLKVFLCCTRTKDSQSDAYSEIAYLFAEFFRDLDIVPSDIIAGLVLLRQRQRAKRNAVLDEANNDILAFLSGMPVTRNTKYLDLKNSQEMLRYKEVCYYMLFALAAYGWPMYLMRKPACGLCQLARSCSCCLCPARPRFAPGVTIEEDNCCGCNAIAIRRHFLDENMTAVDIVYTSCHDAVYETPFYVAVDHDKKKVVISIRGTLSPKDALTDLTGDAERLPVEGHHGTWLGHKGMVLSAEYIKKKLEQEMVLSQAFGRDLGRGTKHYGLIVVGHSLGAGTAAILSFLLRPQYPTLKCFAYSPPGGLLSEDAMEYSKEFVTAVVLGKDLVPRIGLSQLEGFRRQLLDVLQRSTKPKWRIIVGATKCIPKSELPEEVEVTTLASTRLWTHPSDLTIALSASTPLYPPGRIIHVVHNHPAEQCCCCEQEEPTYFAIWGDNKAFNEVIISPAMLHEHLPYVVMEGLNKVLENYNKGKTALLSAAKVMVSPTEVDLTPELIFQQQPLPTGPPMPTGLALELPTADHRNSSVRSKSQSEMSLEGFSEGRLLSPVVAAAARQDPVELLLLSTQERLAAELQARRAPLATMESLSDTESLYSFDSRRSSGFRSIRGSPSLHAVLERDEGHLFYIDPAIPEENPSLSSRTELLAADSLSKHSQDTQPLEAALGSGGVTPERPPSAAANDEEEEVGGGGGGPASRGELALHNGRLGDSPSPQVLEFAEFIDSLFNLDSKSSSFQDLYCMVVPESPTSDYAEGPKSPSQQEILLRAQFEPNLVPKPPRLFAGSADPSSGISLSPSFPLSSSGELMDLTPTGLSSQECLAADKIRTSTPTGHGASPAKQDELVISAR

SEQ ID NO: 221 - DNA, 7940 bp, Homo sapiens
  AF044209
ccaagatggcggccaaggtggcgaagcagcagccgcggcggcggcggcggctggagtgagcgtccgactcgccgcgccgaacgaggtcccggtgtagggccgcgcgccgtggccgcgtcccactcctcaggccggggcgcacgtcggctcccacgcttagccagctcccggtggtttcctagaaacatgattgtttattggcattgatctcacagtctggtgaggacttctttactgataatgtcaagttcaggttatcctcccaaccaaggagcattcagcacagaacaaagtcgttatcctcctcactctgtccagtatacatttcccaacacccgccaccagcaggagttcgcagtccctgattatcgttcctctcatcttgaagtgagtcaggcatcacagcttttgcagcaacagcagcagcaacagcttcgaaggcgaccttccttgctttcagaatttcacccaggttctgacaggcctcaagaaaggagaactagttatgaaccgtttcatccaggcccatccccagtggatcatgattcactggaatcgaagcgaccacgtctggaacaggtttctgattctcattttcagcgtgtcagtgctgcggttttgcctttagtgcacccgctgccagaagggctgagggcttctgcagatgctaagaaggatccagcattcggaggcaaacatgaagctccatcctctccaatttcggggcaaccatgtggagatgatcaaaatgcttcaccttcaaaactctcaaaggaagagttaatacagagtatggatcgtgtagatcgagaaattgcaaaagtagaacagcagatccttaaactgaaaaagaaacaacaacagcttgaagaagaggcagctaaacctcctgagcctgagaagcccgtgtcccctcctcctgtggagcagaaacaccgcagtattgtccaaattatttatgatgagaatcggaaaaaagcagaagaagctcataaaatttttgaaggtcttggcccaaaagttgaactgccactgtataaccagccatcagataccaaggtgtaccatgagaacatcaagacaaaccaggtgatgaggaaaaaactcattttattttttaaaagaagaaatcatgcaagaaaacaaagggaacaaaaaatctgccagcgttatgatcagctcatggaggcatgggagaaaaaagtggacagaatagaaaataatcctcggaggaaagctaaagaaagcaaaacaagggaatactatgaaaagcagtttccagaaattcgaaaacaaagagaacagcaagaaagatttcagcgagttgggcagaggggagctggtctttcagccaccattgctaggagtgagcatgagatttctgaaattattgatgggctctctgagcaggagaataatgagaaacaaatgcggcagctctctgtgattccacctatgatgtttgatgcagaacaaagacgagtcaagttcattaacatgaatgggcttatggaggaccctatgaaagtgtataaagataggcagtttatgaatgtttggactgaccatgaaaaggagatctttaaggacaagtttatccagcatccaaaaaactttggactaattgcatcatacttggagaggaagagtgttcctgattgtgttttgtattactatttaaccaagaaaaatgagaattataaagccctcgtcagaaggaattatgggaaacgcagaggcagaaaccagcaaattgctcgaccctcgcaagaagaaaaagtagaagaaaaagaagaggataaagcagaaaaaacagaaaaaaaagaagaagaaaagaaagatgaagaggaaaaagatgaaaaagaagactccaaagaaaataccaaggaaaaggacaagatagatggtacagcagaagaaactgaggaaagagagcaagccacaccccgggggcgaaagactgccaacagtcagggccgccgtaagggccggatcaccaggtccatgacaaacgaagctgcagctgccagtgctgcagccgcagcggctactgaagagcccccaccacctctgccaccgccaccagaacccatttctacagagcctgtggagacctctcgatggacagaagaagaaatggaagttgctaaaaaaggtctagtagaacatggtcgtaactgggcagcaattgctaaaatggtgggaacgaaaagtgaagctcaatgtaaaaacttctattttaactataaaaggcgacacaatcttgacaacctcttacagcagcataaacagaaaacttcacgaaaacctcgtgaagagcgagatgtgtctcaatgtgaaagtgtcgcttccactgtttctgctcaggaggatgaagatattgaagcctccaatgaagaagaaaatccagaagacagcgaagttgaagctgtcaagcccagcgaggacagtcctgaaaatgctacttctcgaggaaacacagaacctgcggttgagcttgagcccaccacggaaactgcacccagtacatctccctccttagcagttccaagtacaaaaccagctgaagatgaaagtgtggagacccaggtgaatgacagcatcagtgctgagacagcagagcagatggatgtagatcagcaggagcacagtgctgaagagggttctgtttgtgatcccccacccgctaccaaagctgactctgtggacgttgaagtgagggtgccagaaaaccatgcatctaaagttgaaggtgataataccaaagaaagagacttggatagagccagtgagaaggtggaacctagagatgaagatttggtggtagctcagcaaataaatgcccaaaggcccgagccccagtcagacaatgattccagtgccacgtgcagcgctgatgaggatgtggatggagagccagagaggcagagaatgtttcctatggactcaaagccttcactgttaaaccccactggatctatactcgtctcatctccgttaaaaccaaatccactggatctgccacagcttcagcatcgagctgctgttatcccaccaatggtatcctgcaccccatgtaacataccaattggaaccccagtgagcggctatgctctctaccagcgacacattaaagcaatgcatgagtcagcactcctggaggagcagcggcagagacaagaacagatagatttggaatgtagaagttctacaagtccatgtggcacatccaagagtccaaacagagagtgggaagtccttcagcctgctccacatcaattgataactaatctccctgaaggcgttcggcttccgacaactcgaccaaccaggccaccgccccctctcatcccgtcatccaaaaccacagtggcttcagaaaaaccatcttttataatgggaggctccatctcacagggaacaccaggcacttatttgacttctcataatcaggcttcctacactcaagaaacacccaagccgtcagtaggatctatctctcttggactgccacggcaacaggaatctgccaaatcagctactttgccctacatcaagcaggaagaattttctccccgaagccaaaactcacaacctgagggtctgttggtcagggcccaacatgaaggtgtagtcagaggtaccgcaggagccatacaagaaggaagtataactcggggaactccaaccagcaaaatttcagtggagagcattccatccctacggggctctatcactcagggcaccccggctctgccccagactggcataccaacagaggctttggtgaaggggtccatttcgagaatgcccattgaagacagcagtcctgagaaaggcagagaggaagctgcatccaaaggccatgttatttatgaaggcaaaagtggacatatcttgtcatatgataatattaagaatgcccgagaagggactaggagtccaagaacagctcatgaaatcagtttaaagagaagctatgaatcagtggaaggaaatataaagcaagggatgtcaatgagggagtctcctgtatcagcaccgttagaggggctgatatgccgagcattacccagggggagtcctcattctgacctcaaagaaaggactgtattgtctggctccataatgcaggggacaccaagagcaacaactgaaagctttgaagatggccttaaatatcccaaacaaattaaaagggaaagtcctcccatacgagcatttgaaggtgccattaccaaaggaaaaccatatgatggcatcaccaccatcaaagaaatggggcgttccattcatgagattccaaggcaagatattttaactcaggaaagtcggaaaactccagaagtggtccagagcacacggccgataattgagggttccatttcccagggcacaccaataaagtttgacaacaactcaggtcaatctgccatcaaacacaatgtcaaatccttaatcacggggcctagcaaactatcccgtggaatgcctccgctggaaattgtgccagagaacataaaagtggtagaacggggaaaatatgaggatgtgaaagcaggcgagaccgtgcgttcccggcacacgtcagtggtaagctctggcccctccgttcttaggtccacactgcatgaagctcccaaagcacaactgagccctgggatttatgatgacaccagtgcacggaggacccctgtgagttatcaaaacaccatgtccagaggctcacccatgatgaacagaacttctgatgttacaattcctcctaacaagtctaccaatcatgaaaggaaatcgacactgacccctacccagagggaaagtatcccagcgaagtctccagtgcctggggtggaccctgtcgtgagccacagtccgtttgatccccatcacagaggcagcactgcaggcgaggtttattggagccacctgcccacgcaattggatccagccatgccttttcacagggctttggatcctgcagcggctgcttacctgtttcagagacagctttcaccaactccaggttacccaagtcagtatcagctttacgcaatggagaacacaagacagacaatcttaaatgattacattacctcacaacagatgcaagtgaacttgcgtccagatgtggccagaggactctccccaagagagcagccactgggtctcccatacccagcaacgagaggaatcattgacctgaccaatatgcctccaacaattttagtgcctcatccagggggaacaagcactcctcccatggacagaatcacttatattcctggtacacagattactttccctcccaggccgtacaactctgcttccatgtctccaggacacccaacacaccttgcagctgctgcaagtgctgagagggaacgggaacgggagcgggagaaggagcgggagcgggaacggattgctgcagcttcctccgacctctacctgcggccaggctcagaacagcctggccgacctggcagtcatggatatgttcgctccccttccccttcagtaagaactcaggagaccatgttgcaacagagacccagtgttttccaaggaaccaatggaaccagtgtaatcacacctttggatccaactgctcagctacgaatcatgccactgcctgctgggggcccttcaataagccaaggcctgccagcctcccgttacaacactgctgcggatgccctggctgctcttgtggatgctgcagcttctgcaccccagatggatgtgtccaaaacaaaagagagtaagcatgaagctgccaggttagaagaaaatttgagaagcaggtcagcagcagttagtgaacagcagcagctagagcagaaaaccctggaggtggagaagagatctgttcagtgtttatacacttcttcagcctttccaagtggcaagccccagcctcattcttcagtagtttattctgaggctgggaaagataaagggcctcctccaaaatccagatatgaggaagagctaaggaccagagggaagactaccattactgcagctaacttcatagacgtgatcatcacccggcaaattgcctcggacaaggatgcgagggaacgtggctctcaaagttcagactcttctagtagcttatcttctcacaggtatgaaacacctagcgatgctattgaggtgataagtcctgccagctcacctgcgccaccccaggagaaactgcagacctatcagccagaggttgttaaggcaaatcaagcggaaaatgatcctaccagacaatatgaaggaccattacatcactatcgaccacagcaggaatcaccatctccccaacaacagctgcccccttcttcacaggcagagggaatggggcaagtgcccaggacccatcggctgatcacacttgctgatcacatctgtcaaattatcacacaagattttgctagaaatcaagtttcctcgcagactccccagcagcctcctacttctacattccagaactcaccttctgctttggtatctacacctgtgaggactaaaacatcaaaccgttacagcccagaatcccaggctcagtctgtccatcatcaaagaccaggttcaagggtctctccagaaaatcttgtggacaaatccaggggaagtaggcctggaaaatccccagagaggagtcacgtctcttccgagccctacgagcccatctccccaccccaggttccggttgtgcatgagaaacaggacagcttgctgctcttgtctcagaggggcgcagagcctgcagagcagaggaatgatgcccgctcaccagggagtataagctacttgccttcattcttcaccaagcttgaaaatacatcacccatggttaaatcaaagaagcaggagatttttcgtaagttgaactcctctggtggaggtgactctgatatggcagctgctcagccaggaactgagatctttaatctgccagcagttactacgtcaggctcagttagctctagaggccattcttttgctgatcctgccagtaatcttgggctggaagacattatcaggaaggctctcatgggaagctttgatgacaaagttgaggatcatggagttgtcatgtcccagcctatgggagtagtgcctggtactgccaacacctcagttgtgaccagtggtgagacacgaagagaggaaggggacccatcacctcattcaggaggagtttgcaaaccaaagctgatcagcaagtcaaacagcaggaaatctaagtctcctatacctgggcaaggctacttaggaacggaacggccctcttcagtctcctctgtacattcagaaggggattaccataggcagacgccagggtgggcctgggaagacaggccctcttcaacaggctcaactcagtttccttataaccctctgactatgcggatgctcagcagtactccaccaacaccgattgcatgtgctccctctgcggtgaaccaagcagctcctcaccaacagaacaggatctgggagcgagagcctgccccactgctctcagcacagtacgagaccctgtcggatagtgatgactgaactgcacaaagtgaggggaacagggtgcaggagagggatctctagtttttgtggtttaatttttagtagcaggtcaaaaacctgccctcctgtgacttattccctgagacttttcaggagagccagcccacagatgatgaagaaatgatggaagttcatttggagagtcaaatgggaaaaaaacaaacaaaaaactgcctttgatacaggcaattcagtggactataataatagtggagggttgagatgtagagtttttaaaaagtgaacagttgctgttcttacatctgtaaagaaaaccataatgtctttaaatcactcttctgtaaatagatgacctttttgcagtgtaaaaaaaaaaaaaaaaaaaaaaaaaa

SEQ ID NO: 222 - protein, 2440 aa, Homo sapiens [sequence omitted]

SEQ ID NO: 223 - DNA, 792 bp, Homo sapiens
  U28936
atggatgatcgagaggatctggtgtaccaggcgaagctggccgagcaggctgagcgatacgacgaaatggtggagtcaatgaagaaagtagcagggatggatgtggagctgacagttgaagaaagaaacctcctatctgttgcatataagaatgtgattggagctagaagagcctcctggagaataatcagcagcattgaacagaaagaagaaaacaagggaggagaagacaagctaaaaatgattcgggaatatcggcaaatggttgagactgagctaaagttaatctgttgtgacattctggatgtactggacaaacacctcattccagcagctaacactggcgagtccaaggttttctattataaaatgaaaggggactaccacaggtatctggcagaatttgccacaggaaacgacaggaaggaggctgcggagaacagcctagtggcttataaagctgctagtgatattgcaatgacagaacttccaccaacgcatcctattcgcttaggtcttgctctcaatttttccgtattctactacgaaattcttaattcccctgaccgtgcctgcaggttggcaaaagcagcttttgatgatgcaattgcagaactggatacgctgagtgaagaaagctataaggactctacacttatcatgcagttgttacgtgataatctgacactatggacttcagacatgcagggtgacggtgaagagcagaataaagaagcgctgcaggacgtggaagacgaaaatcagtgagacataagccaacaagagaaacca

SEQ ID NO: 224 - protein, 255 aa, Homo sapiens
  P42655
MDDREDLVYQAKLAEQAERYDEMVESMKKVAGMDVELTVEERNLLSVAYKNVIGARRASWRIISSIEQKEENKGGEDKLKMIREYRQMVETELKLICCDILDVLDKHLIPAANTGESKVFYYKMKGDYHRYLAEFATGNDRKEAAENSLVAYKAASDIAMTELPPTHPIRLGLALNFSVFYYEILNSPDRACRLAKAAFDDAIAELDTLSEESYKDSTLIMQLLRDNLTLWTSDMQGDGEEQNKEALQDVEDENQ

SEQ ID NO: 225 - DNA, 1702 bp, Homo sapiens
  AJ299442
  misc_feature 1610..1614, 1627..1629, 1632, 1634, 1635, 1643, 1652: n is uncertain
  misc_feature 1665, 1666, 1668, 1681..1683: n is uncertain
gttatcctgtacaggtggagctggtcgccgccgcggcgctggaattgtgggagttgtgtctgccactcggctgccggaggccgaaggtccctgactatggctccccagagcctgccttcatctaggatggctcctctgggcatgctgcttgggctgctgatggccgcctgcttcaccttctgcctcagtcatcagaacctgaaggagtttgccctgaccaacccagagaagagcagcaccaaagaaacggagagaaaagaaaccaaagccgaggaggagctggatgccgaagtcctggaggtgttccacccgacgcatgagtggcaggcccttcagccagggcaggctgtccctgcaggatcccacgtacggctgaatcttcagactggggaaagagaggcaaaactccaatatgaggacaagttccgaaataatttgaaaggcaaaaggctggatatcaacaccaacacctacacatctcaggatctcaagagtgcactggcaaaattcaaggagggggcagagatggagagttcaaaggaagacaaggcaaggcaggctgaggtaaagcggctcttccgccccattgaggaactgaagaaagactttgatgagctgaatgttgtcattgagactgacatgcagatcatggtacggctgatcaacaagttcaatagttccagctccagtttggaagagaagattgctgcgctctttgatcttgaatattatgtccatcagatggacaatgcgcaggacctgctttcctttggtggtcttcaagtggtgatcaatgggctgaacagcacagagcccctcgtgaaggagtatgctgcgtttgtgctgggcgctgccttttccagcaaccccaaggtccaggtggaggccatcgaagggggagccctgcagaagctgctggtcatcctggccacggagcagccgctcactgcaaagaagaaggtcctgtttgcactgtgctccctgctgcgccacttcccctatgcccagcggcagttcctgaagctcggggggctgcaggtcctgaggaccctggtgcaggagaagggcacggaggtgctcgccgtgcgcgtggtcacactgctctacgacctggtcacggagaagatgttcgccgaggaggaggctgagctgacccaggagatgtccccagagaagctgcagcagtatcgccaggtacacctcctgccaggcctgtgggaacagggctggtgcgagatcacggcccacctcctggcgctgcccgagcatgatgcccgtgagaaggtgctgcagacactgggcgtcctcctgaccacctgccgggaccgctaccgtcaggacccccagctcggcaggacactggccagcctgcaggctgagtaccaggtgctggccagcctggagctgcaggatggtgaggacgagggctacttccaggagctgctgggctctgtcaacagcttgctgaaggagctgagatgaggccccacaccaggactggactgggatgccgctagtgaggctgaggggtgccagcgtgggtgggcttctcaggcaggaggacatcttggcagtgctggcttggccattaaatggaaacctgaaggccnnnnnaaaaaaaaaaaannnaanannaaaaaaanaaaaaaaanaaaaaaaaaaaannanaaaaaaaaaaaannnaaaaaaaaaaaaaaaaaaa

SEQ ID NO: 226 - protein, 461 aa, Homo sapiens
  Q9H173
MAPQSLPSSRMAPLGMLLGLLMAACFTFCLSHQNLKEFALTNPEKSSTKETERKETKAEEELDAEVLEVFHPTHEWQALQPGQAVPAGSHVRLNLQTGEREAKLQYEDKFRNNLKGKRLDINTNTYTSQDLKSALAKFKEGAEMESSKEDKARQAEVKRLFRPIEELKKDFDELNVVIETDMQIMVRLINKFNSSSSSLEEKIAALFDLEYYVHQMDNAQDLLSFGGLQVVINGLNSTEPLVKEYAAFVLGAAFSSNPKVQVEAIEGGALQKLLVILATEQPLTAKKKVLFALCSLLRHFPYAQRQFLKLGGLQVLRTLVQEKGTEVLAVRVVTLLYDLVTEKMFAEEEAELTQEMSPEKLQQYRQVHLLPGLWEQGWCEITAHLLALPEHDAREKVLQTLGVLLTTCRDRYRQDPQLGRTLASLQAEYQVLASLELQDGEDEGYFQELLGSVNSLLKELR

SEQ ID NO: 227 - DNA, 1534 bp, Homo sapiens
  AB034951
gcttccttcgttattggagccaggcctacaccccagcaaccatgtccaagggacctgcagttggtattgatcttggcaccacctactcttgtgtgggtgttttccagcacggaaaagtcgagataattgccaatgatcagggaaaccgaaccactccaagctatgtcgcctttacggacactgaacggttgatcggtgatgccgcaaagaatcaagttgcaatgaaccccaccaacacagtttttgatgccaaacgtctgattggacgcagatttgatgatgctgttgtccagtctgatatgaaacattggccctttatggtggtgaatgatgctggcaggcccaaggtccaagtagaatacaagggagagaccaaaagcttctatccagaggaggtgtcttctatggttctgacaaagatgaaggaaattgcagaagcctaccttgggaagactgttaccaatgctgtggtcacagtgccagcttactttaatgactctcagcgtcaggctaccaaagatgctggaactattgctggtctcaatgtacttagaattattaatgagccaactgctgctgctattgcttacggcttagacaaaaaggttggagcagaaagaaacgtgctcatctttgacctgggaggtggcacttttgatgtgtcaatcctcactattgaggatggaatctttgaggtcaagtctacagctggagacacccacttgggtggagaagattttgacaaccgaatggtcaaccattttattgctgagtttaagcgcaagcataagaaggacatcagtgagaacaagagagctgtaagacgcctccgtactgcttgtgaacgtgctaagcgtaccctctcttccagcacccaggccagtattgagatcgattctctctatgaaggaatcgacttctatacctccattacccgtgcccgatttgaagaactgaatgctgacctgttccgtggcaccctggacccagtagagaaagcccttcgagatgccaaactagacaagtcacagattcatgatattgtcctggttggtggttctactcgtatccccaagattcagaagcttctccaagacttcttcaatggaaaagaactgaataagagcatcaaccctgatgaagctgttgcttatggtgcagctgtccaggcagccatcttgtctggagacaagtctgagaatgttcaagatttgctgctcttggatgtcactcctctttcccttggtattgaaactgctggtggagtcatgactgtcctcatcaagcgtaataccaccattcctaccaagcagacacagaccttcactacctattctgacaaccagcctggtgtgcttattcaggtttatgaaggcgagcgtgccatgacaaaggataacaacctgcttggcaagtttgaactcacaggcatgccaggaggaatgcctgggggatttcctggtggtggagctcctccctctggtggtgcttcctcagggcccaccattgaagaggttgattaagccaaccaagt

SEQ ID NO: 228 - protein, 646 aa, Homo sapiens
  P11142
MSKGPAVGIDLGTTYSCVGVFQHGKVEIIANDQGNRTTPSYVAFTDTERLIGDAAKNQVAMNPTNTVFDAKRLIGRRFDDAVVQSDMKHWPFMVVNDAGRPKVQVEYKGETKSFYPEEVSSMVLTKMKEIAEAYLGKTVTNAVVTVPAYFNDSQRQATKDAGTIAGLNVLRIINEPTAAAIAYGLDKKVGAERNVLIFDLGGGTFDVSILTIEDGIFEVKSTAGDTHLGGEDFDNRMVNHFIAEFKRKHKKDISENKRAVRRLRTACERAKRTLSSSTQASIEIDSLYEGIDFYTSITRARFEELNADLFRGTLDPVEKALRDAKLDKSQIHDIVLVGGSTRIPKIQKLLQDFFNGKELNKSINPDEAVAYGAAVQAAILSGDKSENVQDLLLLDVTPLSLGIETAGGVMTVLIKRNTTIPTKQTQTFTTYSDNQPGVLIQVYEGERAMTKDNNLLGKFELTGIPPAPRGVPQIEVTFDIDANGILNVSAVDKSTGKENKITITNDKGRLSKEDIERMVQEAEKYKAEDEKQRDKVSSKNSLESYAFNMKATVEDEKLQGKINDEDKQKILDKCNEIINWLDKNQTAEKEEFEHQQKELEKVCNPIITKLYQSAGGMPGGMPGGFPGGGAPPSGGASSGPTIEEVD

SEQ ID NO: 229 - DNA, 6782 bp, Homo sapiens
  AX067150
ggttgggctccttggtaccatgtgggaagcgctgtgaagagttgttgccttccaagatatacccaaattcccagttccagcccgtgtcattaaaactccgctggcgtgaaagatgacgtccttagcccagcagctgcaacgactcgccctccctcaaagtgatgccagcctcttatcyagagatgaagttgcttctttgttatttgaccctaaggaagcggccacaatcgacagggacaccgccttcgccattggatgtactggcctggaagagttgcttggaattgatccttcctttgagcagtttgaagcaccgttgttcagtcagctagcaaaaaccttggagcgaagtgttcagaccaaagcagtaaacaaacagttggatgaaaacatttcattattccttattcacttgtcgccttacttcctgcttaagccagcacagaagtgtctggagtggttgattcacaggttccatatacatctctataatcaagatagcctcattgcttgtgttctgccataccacgagacaagaatatttgtgcgagtcatacagcttctaaaaattaataattcaaagcacagatggttctggttgttgccagttaagcaatctggagtgccgttagctaaaggaactttgattacccactgctacaaagatcttggattcatggatttcatttgcagtttggtgacaaaatctgtgaaggtttttgctgagtacccgggcagctcagctcagttgagggtgctcttggctttctatgcttctaccatagtgtcggcgctggtagctgcagaggacgtatcagacaatatcatcgccaaactatttccctatatccaaaagggattgaaatcatctttaccagattacagagctgcaacatacatgataatatgtcagatttctgtgaaagtgaccatggaaaatacctttgtgaattcattggcatcacagatcatcaaaacattgaccaagattccctctttgatcaaggatgggttaagttgcttgatagtgctcctgcagagacagaagccagagagccttgggaaaaagccattccctcacttatgtaatgttcctgatcttattacaatacttcatgggatttctgaaacttacgatgtcagtcctcttctgcgttacatgcttccccatctggtcgtctccatcattcatcatgttacaggagaagaaactgaaggaatggatggtcaaatctacaagagacacttagaagctatacttacaaaaatatcactgaagaacaacttagaccatttgttggctagccttctatttgaagagtatatttcatatagttcacaggaagaaatggattctaataaagtgtctttgcttaatgaacaatttcttccactcattagacttttagaaagcaaataccccagaacattagatgttgtattagaggaacacttaaaggaaattgcagatctgaaaaaacaagagcttttccatcagtttgtttctctttctacaagtggaggaaagtatcagtttttagcagattctgatacttctttgatgctcagcctgaatcatccacttgctcctgtgagaattctggccatgaatcatttgaaaaagatcatgaaaacatcaaaggagggtgttgatgaatctttcataaaagaagctgttttagcccgattaggtgatgataatatagatgttgttttgtcggctataagtgcttttgagattttcaaagaacacttcagttcagaagtgacgatttcaaatcttctgaatctctttcaaagagcagaactttcaaagaatggagaatggtacgaggtacttaagatagccgctgacatattaattaaagaagagatactgagtgaaaatgatcagttgtcaaatcaggtggttgtatgtttgctgccatttgtggttatcaataatgatgatacggaatctgctgagatgaaaattgctatatatttatcaaaatcaggaatctgctccctgcaccctctattaagaggctgggaagaagctcttgaaaatgtaattaaaagcacaaagccaggaaaactaatcggtgtagcaaatcagaagatgattgagttgttggctgataatataaatttaggagatccttcttcaatgttaaagatggtggaggatttgataagcgtgggtgaggaggagtcctttaacctgaagcagaaagtaacgtttcatgtgatcctgtctgtgctcgtctcttgttgttcatctttaaaagaaacccactttccatttgcgataagagtcttcagtttgttgcagaaaaaaataaagaagcttgaaagtgtcattactgcagtggaaatcccctcagaatggcacattgaactgatgttagacagagggatcccagtagagctgtgggcacattatgtagaagagctcaacagcactcagagggtggccgtggaggactcggtttttcttgtattttccttgaaaaaatttatttatgcactgaaagctcctaaatcttttcctaaaggtgatatatggtggaatcctgaacaactgaaagaagacagcagggactatctgcacttgctcattgggctgtttgagatgatgctcaatggtgccgatgctgttcatttcagagttctgatgaaacttttcataaaggtkcatctagaagatgtttttcagttattcaagttctgttctgttttatggacctatggttctagcctttcaaatccactaaactgcagtgtgaaaacagtgctgcagactcaagctctttatgtgggctgtgcaatgctttcttctcagaagacacagtgtaaacaccaactggcatccatatcttctccagtggtgacatctttactcattaacctgggaagccccgtaaaagaagttcgtagggctgccattcagtgtctccaggccctcagtggagtggcatccccgttttatctgataatagatcatttgatttctaaagcagaggagatcacttcagatgctgcctatgttattcaggatttggctactttatttgaggaactacagagagaaaagaaactgaaatctcatcagaagttgtctgaaactttgaaaaacttacttagttgtgtgtatagttgcccatcttatatagcaaaagatttgatgaaagtacttcagggagtcaacggtgagatggtgctttctcagctattgcctatggctgaacaactgctagaaaagatccagaaggagcccacagctgtgctgaaagatgaggccatggttctgcatctcactctgggaaagtataatgaattttcagtttcccttttaaatgaggatccgaagagtctagatatatttataaaagctgtgcacacaacaaaggaactttacgcgggaatgccaaccattcagatcacagcccttgaaaagattacaaaaccattttttgcagccatatcagatgaaaaagttcagcagaagcttttaagaatgttgtttgatttattggtgaactgtaaaaactcacattgtgctcagactgtcagcagtgtttttaaagggatttccgttaatgctgaacaagtccgaatagaactggagccaccagataaagctaaacccttgggcacagttcagcaaaaaagaaggcaaaaaatgcagcagaaaaaatcacaagatctagaatctgttcaggaagttggaggttcttactggcaaagagtaactctcatcctggaattactgcagcacaaaaagaagctcagaagtcctcagatattggtgccaactctttttaacttgctatcaagatgtttagaacccttgccacaagagcagggaaatatggaatacaccaaacaattaattcttagttgtctgctcaacatctgccaaaaactatctccagatggtggcaaaatacccaaagatattttagatgaggagaagttcaacgtggagttgatagttcagtgcatccgcctttcggagatgccgcagacccatcaccatgcccttttacttttgggcactgttgctggaatatttccggataaagttttacacaatatcatgtctatttttacatttatgggagccaatgtcatgcgcctagatgatacttacagttttcaagttattaacaagacagtgaaaatggttattcccgcacttattcagtctgatagtggagattctatagaagtttcaagaaacgttgaagagattgtggtaaaaatcattagtgtatttgtggatgcgctgccacacgtcccggagcacaggcgcctgcccatccttgttcaacttgttgatacactgggtgcagagaaattcctctggattctcctcatcttgctttttgaacagtatgtcacaaaaacagtgctggcggctgcctatggcgaaaaggatgctattttagaagcagacactgaattttggttttcagtctgttgtgagtttagtgtccagcatcagatacaaagcttgatgaatatcctccagtacttactaaagctgccagaggaaaaagaagaaaccattcccaaagcagtgtcatttaataagagtgaatcacaagaagaaatgctacaggtttttaatgtagagactcacactagcaagcaactgcggcattttaaatttttgtcagtgtccttcatgtctcagctcctgtcttccaataattttctgaaaaaggtagttgagagtggtggtcctgagattttaaaaggccttgaagagaggttgctggagaccgttctcggctatatcagtgcagttgcacagtccatggaaaggaacgcagacaaactcaccgtgaagttctggcgcgcgctccttagtaaagcttacgacctgttagataaggtcaatgccttgctgcccacagagacattcattcctgtgatcagagggctggtgggcaatcccctgccatctgttcgccgcaaagcgctggaccttttgaataacaagctgcagcaaaatatatcctggaagaagacaatagttacccgtttcctaaaactggttccagaccttttggccattgtgcagcgtaagaaaaaggaaggggaagaagaacaagcaatcaacagacagacagcgttgtataccttaaagcttttatgcaagaattttggtgcagaaaatccagatccttttgtcccagtgctgarcactgctgtgaaactgattgctccagagagaaaggaggagaagaatgtcytgggaagcgcgctgctgtgcatagcagaggtgacctccaccctggaggcgctggccatcccccagcttcccagcctgatgccatcgttgctgacaacaatgaagaacaccagcgagctggtctccagcgaggtctacctgctcagtgccttggctgctctgcagaaggttgtggagactctcccgcacttcatcagcccctatctggaaggcattctctcccaggtgattcatctggagaaaatcactagtgaaatgggttctgcgtcacaggctaatatccgtctcacatctcttaaaaagacactggctaccacacttgcaccccgagtcctgttgcccgccatcaaaaaaacttacaagcagattgagaagaactggaagaatcacatgggtccgtttatgagcatcttgcaagagcatattggggygatgaagaaggaagagctcacctcccatcagtctcagctaaccgcctttttcctggargccctggacttccgagcccagcactctgagaacgatctggaggaagttggaaaaacggaaaattgtatcattgactgtctagtagccatggttgtcaaactttccgaggtcacattcaggcccctgttcttcaagctgtttgattgggctaaaacagaagatgccccaaaggacaggttgttgacattttacaacttggcagattgcattgctgaaaagctgaaagggctttttactctgtttgccggccacttagtgaagccttttgctgacaccttgraccaggtgaacatctccaaaacagatgaagcattttttgactctgaaaatgaccctgaaaagtgctgcttgctgttgcagtttattttgaactgtttatacaaaatcttcctttttgatacccagcattttataagtaaagagagagcagragccttgatgatgcctctggtggatcagctggaaaacaggcttgggggagaagagaaattccaggaacgggtgacaaagcacctgataccatgcatcgcacagttttcrgtggccatggcggatgactctctttggaaaccactgaactaccagattctgctaaagacgagagactcctcgcctaaggttcgatttgctgctttgattactgtgttagcactggctgaaaaactaaaggagaattatattgtcttgctaccagaatccattcctttcttagcagagttgatggaagatgaatgtgaagaagtagaacatcagtgccaaaagactattcagcaactggaaactgtcctgggagagccactccagagctatttctaagactttctgtggtgtttcatactctactcagagttcacactcatatttcatatttttatttttgggtgttgggtgccatgttacttttggtgccttaatacacctacttggattacttacaaatgttttatcacttcgttacaaaatccccacctggcttgtgctgccacataagcctctcctgcctatcgtatagagctgcagaaagagtaaatgatacacggtatttttatac

SEQ ID NO: 230 - protein, 2144 aa, Homo sapiens [sequence omitted]

SEQ ID NO: 231 - DNA, 1789 bp, Homo sapiens
  BC012547
ggggcttttcagtcgggcgctgagtggtttttcggatcatgtctggtggctccgcggattataacagcagagaacatggcggcccagagggaatggaccccgatggtgtcatcgagagcaactggaatgagattgttgataactttgatgatatgaatttaaaggagtctctccttcgtggcatctatgcttacggttttgagaagccttccgctattcagcagagagctattattccctgtattaaagggtatgatgtgattgctcaagctcagtcaggtactggcaagacagccacatttgccatttccatcctgcaacagttggagattgagttcaaggagacccaagcactagtattggcccccaccagagaactggctcaacagatccaaaaggtaattctggcacttggagactatatgggagccacttgtcatgcctgcattggtggaacaaatgttcgaaatgaaatgcaaaaactgcaggctgaagcaccacatattgttgttggtacacccgggagagtgtttgatatgttaaacagaagatacctttctccaaaatggatcaaaatgtttgttttggatgaagcagatgaaatgttgagccgtggttttaaggatcaaatctatgagattttccaaaaactaaacacaagtattcaggttgtgttgctttctgccacaatgccaactgatgtgttggaagtgaccaaaaaattcatgagagatccaattcgaattctggtgaaaaaggaagaattgacccttgaaggaatcaaacagttttatattaatgttgagagagaggaatggaagttggatacactttgtgacttgtacgagacactgaccattacacaggctgttatttttctcaatacgaggcgcaaggtggactggctgactgagaagatgcatgccagagacttcacagtttctgctctgcatggtgacatggaccagaaggagagagatgttatcatgagggaattccggtcagggtcaagtcgtgttctgatcactactgacttgttggctcgcgggattgatgtgcaacaagtgtctttggttataaattatgatctacctaccaatcgtgaaaactatattcacagaattggcagagggggtcgatttgggaggaaaggtgtggctataaactttgttactgaagaagacaagaggattcttcgtgacattgagactttctacaatactacagtggaggagatgcccatgaatgtggctgaccttatttaattcctgggatgagagttttggatgcagtgctcgctgttgctgaataggcgatcacaacgtgcattgtgcttctttctttgggaatatttgaatcttgtctcaatgctcataacggatcagaaatacagattttgatagcaaagcgacgttagtcgtgagctcttgtgaggaaagtcattggctttatcctctttagagttagactgttggggtgggtataaaagatggggtctgtaaaatctttctttcttagaaatttatttcctagttctgtagaaatggttgtattagatgttctctatcatttaataatatacttgtggactaaaagatataagtgctgtataaaatcagccaattatgttaaactagcatatctgcctttattgtgtttgtcattagcctgagtagaaaggcctttaaaatttttttagaaagcatttgaatgcattttgtttggtattgtatttattcaataaagtatttaattagtgtaaaaaaaaaaaaaaaaaaaaaaaaaaaaa

SEQ ID NO: 232 - protein, 408 aa, Homo sapiens
  Q96EA8
MSGGSADYNSREHGGPEGMDPDGVIESNWNEIVDNFDDMNLKESLLRGIYAYGFEKPSAIQQRAIIPCIKGYDVIAQAQSGTGKTATFAISILQQLEIEFKETQALVLAPTRELAQQIQKVILALGDYMGATCHACIGGTNVRNEMQKLQAEAPHIVVGTPGRVFDMLNRRYLSPKWIKMFVLDEADEMLSRGFKDQIYEIFQKLNTSIQVVLLSATMPTDVLEVTKKFMRDPIRILVKKEELTLEGIKQFYINVEREEWKLDTLCDLYETLTITQAVIFLNTRRKVDWLTEKMHARDFTVSALHGDMDQKERDVIMREFRSGSSRVLITTDLLARGIDVQQVSLVINYDLPTNRENYIHRIGRGGRFGRKGVAINFVTEEDKRILRDIETFYNTTVEEMPMNVADLI

SEQ ID NO: 233 - DNA, 5873 bp, Homo sapiens
  AB028983
ggagcctaccataagcacctcatggaactcgctcttcagcaaacatatcaggacacctgtaattgcatcaagtcgcggatcaagttggaatttgaaaaacgtcaacaggagcggcttctgctctccctgctgccggcccacatcgccatggagatgaaagcggagatcatccagaggctgcagggccccaaggcgggccagatggagaacacaaataacttccacaacctgtatgtgaagcggcatacaaacgtgagcatcttatacgctgacatcgttggctttacccggctggcaagtgactgctccccgggagaactagtccacatgctgaatgagctctttggaaagtttgatcaaattgcaaaggagaatgaatgcatgagaattaaaattttaggagactgctactactgtgtatctggactccctatatctctccctaaccatgccaagaactgtgtgaaaatggggctggacatgtgtgaagccataaagaaagtgagggatgctactggagttgatatcaacatgcgcgtgggcgtgcattctgggaatgtcctgtgtggcgtgattggtctgcagaagtggcaatatgatgtgtggtcacatgatgtgaccttggccaaccacatggaagctggaggggtccctggacgtgttcacatttcttctgtcaccctggagcacttgaatggcgcttataaagtggaggagggagatggtgacattagggacccatatttaaaacagcacctggtgaaaacctactttgtgatcaaccccaagggagaacgacggagcccccagcatctcttcagacctcgccacacccttgatggagccaaaatgagggcctcggtccgcatgacccggtacttggagtcctggggggcagccaagccctttgcacacctacatcacagggacagcatgaccacagagaacggcaagatcagcaccacggatgtacccatgggtcagcataattttcaaaatcgcaccttaagaaccaagtcacaaaagaagagatttgaagaagaattgaatgaaaggatgattcaagcaattgatgggattaatgcacagaagcaatggctcaagtctgaagacattcagagaatctcactgcttttctataacaaagtactagaaaaagagtaccgggccacggcactgccagcgttcaagtattatgtgacttgtgcctgtctcatattcttctgcatcttcattgtgcagattctcgtgctgccaaaaacgtctgtcctgggcatctcctttggggctgcgtttctcttgctggccttcatcctcttcgtctgctttgctggacagcttctgcaatgcagcaaaaaagcctctcccctgctcatgtggcttttgaagtcctcgggcatcattgccaaccgcccctggccacggatctctctcacgatcatcaccacagccatcatattaatgatggccgtgttcaacatgtttttcctgagtgactcagaggaaacaatccctccaactgccaacacaacaaacacaagcttttcagcctcaaataatcaggtggcgattctgcgtgcgcagaatttatttttcctcccgtactttatctacagctgcattctgggactgatatcctgttccgtgttcctgcgggtaaactatgagctgaagatgttgatcatgatggtggccttggtgggctacaacaccatcctactccacacccacgcccacgtcctgggcgactacagccaggtcttatttgagagaccaggcatttggaaagacctgaagaccatgggctctgtgtctctctctatattcttcatcacactgcttgttctgggtagacagaatgaatattactgtaggttagacttcttatggaagaacaaattcaaaaaagagcgggaggagatagagaccatggagaacctgaaccgcgtgctgctggagaacgtgcttcccgcgcacgtggctgagcacttcctggccaggagcctgaagaatgaggagctataccaccagtcctatgactgcgtctgtgtcatgtttgcctccattccggatttcaaagaattttatacagaatccgacgtgaacaaggagggcttggaatgccttcggctcctgaacgagatcatcgctgactttgatgatcttctttccaagccaaaattcagtggagttgaaaagattaagaccattggcagcacatacatggcagcaacaggtctgagcgctgtgcccagccaggagcactcccaggagcccgagcggcagtacatgcacattggcaccatggtggagtttgcttttgccctggtagggaagctggatgccatcaacaagcactccttcaacgacttcaaattgcgagtgggtattaaccatggacctgtgatagctggtgtgattggagctcagaagccacaatatgatatctggggcaacactgtcaatgtggccagtaggatggacagcaccggagtcctggacaaaatacaggttaccgaggagacgagcctcgtcctgcagaccctcggatacacgtgcacctgtcgaggaataatcaacgtgaaaggaaagggggacctgaagacgtactttgtaaacacagaaatgtcaaggtccctttcccagagcaacgtggcatcctgaagagtcaccttcattttggcaagaagactgtattttcaggaaggtatcacacactttctgactgcaacttctgtcccttgtttttgatgtgcgtgctgtctgtcctatggagcctctgcagactcgttctcgtgacccagtggcataccgtttggtgtctgatgtgtgcccagatcgttctgccacttgcactgtgcttgctcctaagcaaaagggaaaaggagcgcgcgtgatagaagaaaagcactgggagaactaacagaggagaaaggtgaaacacacacacattcttaaggcaataaaactagggggtgtatattatcttctggtgcatgttcttttctggaaaatatggtagctcgccaaccgcatctgctcatctgatattcaaacacacagtattcgtgaataagttgattctgtcccccacgtggactctgtgctcacccattgtctcattgccagtggtgtccaagggcccccgttgggacccacggctctcgtccctctgctccgtgtgtctcatgccagcagcacgtcgccatccgtcaccagaattagtcctcacagcctaggaccagttttgtatcaaactcgtctgatgttttgatgccatttgtcttttgtaaagttaattcattaaaagttttatgtactttgatttacagtgcctgtatcttttattttcctgtcttctttctcctgtggtttgctccagaattaaggtttgttttccatccattctcccttttgacacagttgtttcagaaagagctctccagaagccaatattgagatgtaattcagattaggacacagtgtgtgacgcagataactggttactcagctccctggaaagcaggcaagcatgttgaatgtatctagtggtctgattttaatttgggcatctctagagaacgctttcagggaaaaatactttaatagtaaaaagattctctgcgagcaacagtgccccctccgtccactacgctcctgtctccaagaatgttttgctagagctaacagacatagactgcaaaagaataatttggaatcagctatgcaaatcagtctcacaatagcgtgagctaactgagagaagtactaagacccacaaactgcctgttaagtctgagaaggctaaagaagacacacagccaacgttcatgcatttttaaagacagaaggccttgaagaatttgttcttgtaaatccaacacaagttgtttggtacttttaacataaagaaatcatactttgccaaatagtgaaaagtagagcaatcgtgtataagctaatgtttaaaagcaaaactgcaaattgtagcccagttggtcaaacttgttttctttttataactcatggcaggcatctgtaagaagtagagaacccagatgatctcttaggaagccttttattcgtgggaactcgaacttgaagcacaagttcctggtttgaatcctggctctgattttttactggctgtgtgactttgaacacatctcttagtccctcttaggagtactttccttattggcaacttatggaatcgctagtgattaaacgaggcaatgactgtgagagagcctggcaggtgccccgtggtacattcacagcacgggcacagctgctgtgccaggactgtgactcattcccagtaaaaggcacttatcgaagctgataaccgtccttcatcaccgaagtgtgagtagagcatgacttatttagtattctgcctcaatggggaattttttgatcctgtaatcacaactcagcattggccttaatatacctaaatctccaaaaacagtgattaaagcaagagaattattacaagggcttttctctttcctctaactcattcttcacggatgccgtagcgtttccgtgagctcaaactggccttggtgtaaaatgtgtaaggatgagcagcaggcgtgcctcgtgggttcttcctctgttacatcctgctacactcatctgcaggtcaccttagttcacctaccctgagtgaacacccccagctgggtggtccaccaagttctcataaacagagtccctcccattcccccacggggtgcaccgaacttgggtttgcgctaaaaagaactcaaaaggagaactgtgctctcccaaagccatatcaccagtcttaccaaacaataggcttttaaaagcactgagtcattgtcagaatccactatgggaagctctgtgtgtacctggtcccttctaggtgtggtcccataggagcagccttagcatcccctgtgaacttatcaaaaatgcaaattctcaggccccaacctgaaggaggaccctgaatttgagatccccggggctggggcccagcacaactgctgtttagtgaacaggttctccaggtgattctgatccctgatcaagcttcagacctccctccctccccagtgtttttgcaggtgaggaaacaggggcagagtaattcaggcacatgtgttcagagttccacagttgattagcagttgaggccaggctagaatggaaaactgcctgttccttgaatctgaaagagcattattcctggtcaaagctccttaaagttctgggcagctaaaagcatccctgtgagcaaaaatgccaggcagaaaactggcagtgcacctctcatcagcccaggtcccagtgccattggcttcaagaaaaaaaaaaatctctccccaatgctctccttaacctttaagtcttacaggaagcctctcatagaaattgcctccagtccagtttcccaaaaaccccagtgttttacatatctgtttaggagtgtctaagttttgtcatcaatccacgatgttattcttccttcccaactcactgtgctcctaaaggcagcaaccattcatctttcctttgctctggatacaccgaatgaccaggtaacatcatcaggccgggtgcagtggctcctataatcccgatattttgggaggccgaggagagaggatcacttaagcccaggagtctgagaccagcctgggcaacatagcaagacccccatctctgcaaaaaaataagaaaattagcttggcatggtggcacgtgcctgtagtcccagctacatgggaggctgaggtgggaggatcacttgagcccaggaagtccagaacgtagtgagccttgattataccactgcactccagcctgggtgacagagcgagactctgtctcag

SEQ ID NO: 234 - protein, 887 aa, Homo sapiens
  Q08462
GAYHKHLMELALQQTYQDTCNCIKSRIKLEFEKRQQERLLLSLLPAHIAMEMKAEIIQRLQGPKAGQMENTNNFHNLYVKRHTNVSILYADIVGFTRLASDCSPGELVHMLNELFGKFDQIAKENECMRIKILGDCYYCVSGLPISLPNHAKNCVKMGLDMCEAIKKVRDATGVDINMRVGVHSGNVLCGVIGLQKWQYDVWSHDVTLANHMEAGGVPGRVHISSVTLEHLNGAYKVEEGDGDIRDPYLKQHLVKTYFVINPKGERRSPQHLFRPRHTLDGAKMRASVRMTRYLESWGAAKPFAHLHHRDSMTTENGKISTTDVPMGQHNFQNRTLRTKSQKKRFEEELNERMIQAIDGINAQKQWLKSEDIQRISLLFYNKVLEKEYRATALPAFKYYVTCACLIFFCIFIVQILVLPKTSVLGISFGAAFLLLAFILFVCFAGQLLQCSKKASPLLMWLLKSSGIIANRPWPRISLTIITTAIILMMAVFNMFFLSDSEETIPPTANTTNTSFSASNNQVAILRAQNLFFLPYFIYSCILGLISCSVFLRVNYELKMLIMMVALVGYNTILLHTHAHVLGDYSQVLFERPGIWKDLKTMGSVSLSIFFITLLVLGRQNEYYCRLDFLWKNKFKKEREEIETMENLNRVLLENVLPAHVAEHFLARSLKNEELYHQSYDCVCVMFASIPDFKEFYTESDVNKEGLECLRLLNEIIADFDDLLSKPKFSGVEKIKTIGSTYMAATGLSAVPSQEHSQEPERQYMHIGTMVEFAFALVGKLDAINKHSFNDFKLRVGINHGPVIAGVIGAQKPQYDIWGNTVNVASRMDSTGVLDKIQVTEETSLVLQTLGYTCTCRGIINVKGKGDLKTYFVNTEMSRSLSQSNVAS

SEQ ID NO: 235 - DNA, 6005 bp, Homo sapiens
  Z35309
gactggctgcagccgcagtcttggtggaggaggtggtgaccaccaccgctcctccacctgcatccggctgcgggactgcggcggccgcgtttgccctgcagaccctgcaccccgggacgcggctcatctgtcattagcaccggcactaagctcccaccgctcagcgacttggtccgccgcaagctccgccgcaggctttgtccgctagcgctcggctgagtctgggcgggcgggaaacctgggctagggcgaggcggggcccctggacatgcctttctccacgtccgcctcctcgaccctattgtaagcggagaaacttagtgtgcgaggcaggcaggggacgtccccattttgatgtcccgtaccctccacccccttcggatcgaggtagtaaagaggctcctgtaggaaactgactgcctctatgattgcggcctcttgggggattttgcgtttagcccgaaagttggctttgccaaaagacgcacgggtaggaagggcgaaaaggaaaccctgtattccgtcgcgctgggctctccgagtccgtgcgcaaagcggcctacgagtcctggctccgcacctgcagaggacaagagccaatgcctaaaaaagaacagcggaggaaccggctggcgcggccagctggaacgctggatcgcagtgcgcccagggaaggccgggggcgcccgccggccctagccctcagtggtcctctcccacgccggcccgcgcgtgcctctgcctacaagacctggggcgtcctggccagatctggatggcaggtccctccgccacccccggcccggttccgggggcgtggcttggcgcgggggcgggtttaagtcaccgcgggtgtctgaccactctgacaggtctccaaatttctcccagtcgcctggcgcccgcggtgcgtttcagagctccagggtggcacgcggcggcgcttccctagatccagaggcgtctctgtcgacttccacgcggcctcgggcctcccttctcctccaaaccttcgcctcatccgccaagcttcggttctcagcctcagatatccgcaccggcggcttctcttcgttctcggagctcttggctttggagccctcaccactttttccttcccccgcctctcctgatcctcctagctccgagccaaatggactccaaagaacgaaataaaggggatgagaactgtgtgctgcgacccttcgaaagcacagctgaaagcgttgacctcgtcttatagatcaggctgggaccctggggcgagagtccccacaccccctccgggagggatgcttctggccagagccagcgctgcgctgtcagtccttgctcccgaactaggaaagagcctaggagggagcctcagcataccccttcctccaaattaactatttggtgaattgttagcgccgaggctaccacctctccaaccctgtcgcggggcgcgccgccacctcaccgtgaccccctcctcctccttctttgccaccgcccccagctccgcccctgctccccatcccggcgcaatggagttctccgaagggcgatgattccagccacatctgctaacttcgcacccatcgctgccgccggtcaccgccggccaggccccctgcagccgcggagcagtgggcgtccaaagcccagtgcagcagccaggacccgcccgacgcgcagcagaagcacggcgcccaggcgcttaggcgtctcttggagagcaaaggctgcgccaaaacgctgagcctagaatcaaccaaggagcctgagcccaggaaggggctgcgtggctcacagcgctgcggctcctgaggacaaatagccactgccgctgcgtacccaagctgcgccggctggcgggagagcagcacgcaaggacgccgaggtccgccgcgatcttccaggtgccctttgcccctgggcacagtatgacccgacctacagggagccctagcgcagggctcctgcaacgggtcagcctaggataaaaaggatccttgccaagctcctaccaggccgcctttgagtctttaggaacccctcctccggctgcctccccaaggttctgggcctccttccctgcggcccagagccatggagctctccgatgtgcgctgccttacaggcagcgaggaactctacaccatccacccgacgcccccggccggcgacggcaggagcgcctcccggccgcagcggctgctgtggcagacggcggtgcgacacatcacggagcagcgcttcattcacgggcaccggggaggcagcggcagcgggagtggaggctcgggcaaagcctcggaccctgcgggcggcggccccaaccaccacgcgccgcagctgtcaggcgactcggcgctgcccctctactcgctgggcccgggagagcgagcgcacagcacctgcggcaccaaagtcttcccggaacgcagcgggagcggcagtgccagcggcagcggaggcgggggcgacctgggcttcctgcaccttgactgtgcccctagcaactcggatttctttcttaatgggggctatagctaccgaggggtcattttccccaccctgcgcaactccttcaaatctcgggatttggaacgcctctaccagcgctatttcttgggccaaaggcgcaaatcggaagtggtgatgaacgtgctggacgtgctgaccaaactcactctcttggtcctacacttgagcctggcctcggcccccatggacccgctcaagggcatcctgctgggcttcttcaccggcattgaggtagtgatctgcgccctggtggtggtcaggaaggacaccacctcccacacgtacctgcagtacagcggcgtggtcacctgggtggccatgaccacccagatcctggcagcaggcctcggctacgggctcctgggcgacggcataggctacgtgctcttcacgctcttcgccacctacagtatgctgccgctgccgctcacctgggccatcctggccggcctgggcacctcgctgctgcaggtcatcctccaagtggtcataccccggctggcggtcatttccatcaaccaggttgtggcccaggcagtgctattcatgtgtatgaacacagctggaatcttcatcagttacctgtcagaccgggcccagcgccaagctttcctggagactcggaggtgtgtggaggccaggctgcgcctggagacagagaaccaaagacaggagcggctcgtgctttctgtgctcccccggtttgttgtcctggaaatgatcaacgacatgaccaatgtggaagatgagcacctgcagcaccagttccatcggatctacatccatcgctatgagaacgtcagtattctttttgcagatgttaaaggatttaccaacctctccacgaccttgtctgctcaggagctggtcaggatgctcaacgagctctttgccagatttgatcgactggcccatgagcatcactgccttcgtattaaaatcctgggggactgctactactgcgtgtctggacttcctgagccccgccaggaccatgcccactgctgtgttgaaatgggtctcagcatgatcaaaaccatcaggtatgtgcggtcaaggacaaaacacgatgttgacatgaggattggaatccactccggctcggtgctgtgcggtgttttgggactacggaagtggcagtttgatgtctggtcttgggatgtggatattgcaaacaaactcgaatctggaggaatccccgggaggattcacatttccaaagccacgctggactgtctcaacggtgactataacgtggaagagggccatggtaaagagaggaatgaattcctgaggaagcataatatcgaaacttacttaattaagcagcctgaggacagtctgctgtccttgcctgaagatatcgtcaaggagtcagtgagctcctcagaccggagaaacagtggggccacattcactgaaggatcctggagccctgaactgccctttgataatatcgtggggaaacagaatactctggctgccctaacaagaaattcaataaatctgcttccaaaccatcttgcacaagctttgcatgtccagtctgggcctgaggaaattaacaagagaatagaacataccatcgacttgcggagtggcgataaattgagaagagagcatatcaagccattctcactgatgtttaaagactccagcctggagcacaagtattctcaaatgagggatgaagtgttcaagtcaaacttggtctgtgcatttatcgttcttctatttatcacggcaatacaaagtttgcttccttcttcaagagtgatgccaatgaccatccagttctccattctgattatgctgcactcggctctggtcctcatcaccacagcagaggattataaatgtttgcccctcatcctccggaaaacttgctgttggattaatgagacctatttggcccggaacgtcatcatctttgcatccattttgattaatttcctgggtgccatcttaaatatcctgtggtgtgattttgacaagtcgatacccttgaagaacctgactttcaattcctcagctgtgtttacagatatctgctcctacccagagtactttgtcttcacgggggtgttggccatggtgacctgtgcagttttcctccggctgaactccgtcctgaagctggcagtgctgctgatcatgattgccatctatgccctgctcactgagaccgtctacgcaggcctctttctgcgttatgacaacctcaaccacagtggagaagatttcctggggaccaaggaggtatcactgctactgatggccatgttcctcctggctgtgttctaccatggacagcagctggagtacacagcccgcctggacttcctttggcgagtacaggccaaagaggagatcaatgagatgaaggagctgagggaacacaatgagaacatgctccggaatatcttacccagccatgtggcccgccatttcctagagaaggaccgagacaatgaggagctgtattctcaatcctatgatgctgttggggtgatgtttgcctccatcccaggatttgcggacttttactctcagactgaaatgaataaccagggagtggaatgcctgcgcttgctcaatgagatcattgctgacttcgatgagttgcttggtgaagaccgatttcaagacattgaaaagattaagaccattggcagcacctacatggccgtgtcaggcctgtcacctgaaaaacagcaatgtgaagacaagtggggacatttgtgtgctctggctgacttctcactcgccctgacagaaagcatacaggagatcaacaagcattcattcaacaattttgaactccggattggcatcagccacggctcagtggtagctggcgttatcggcgctaagaaaccacagtatgacatttggggcaaaactgtgaacctggcaagccgaatggacagcacgggggttagtggccggatccaagtcccagaggagacctatctcatcctgaaggaccagggctttgcctttgattaccgaggggagatctatgtgaagggtatcagtgaacaggaaggaaaaatcaaaacgtactttcttctgggaagagtccaacccaacccattcatcttgcccccaagaagactgcctgggcagtactccctggccgcggttgtcctgggacttgtccagtccctcaataggcaaaggcagaagcagctactcaatgagaacaacaacacaggaatcatcaagggtcattacaaccggcggactttgttgtcacccagcggcacagagcctggagcccaggctgaaggcaccgacaaatctgatttgccataaaagcattttctttctgtttttttttttttttgtatttcttttatatataaaataaatatactaataaaaaggtttaattttttttagaacaaaaaaaaaaaaaaaaaaaaaaaaaaaaaaaaaaaaaaaaaaaaaaccccaaaaaaaaaaaaaaa

SEQ ID NO: 236 - protein, 1251 aa, Homo sapiens
  P40145
MELSDVRCLTGSEELYTIHPTPPAGDGRSASRPQRLLWQTAVRHITEQRFIHGHRGGSGSGSGGSGKASDPAGGGPNHHAPQLSGDSALPLYSLGPGERAHSTCGTKVFPERSGSGSASGSGGGGDLGFLHLDCAPSNSDFFLNGGYSYRGVIFPTLRNSFKSRDLERLYQRYFLGQRRKSEVVMNVLDVLTKLTLLVLHLSLASAPMDPLKGILLGFFTGIEVVICALVVVRKDTTSHTYLQYSGVVTWVAMTTQILAAGLGYGLLGDGIGYVLFTLFATYSMLPLPLTWAILAGLGTSLLQVILQVVIPRLAVISINQVVAQAVLFMCMNTAGIFISYLSDRAQRQAFLETRRCVEARLRLETENQRQERLVLSVLPRFVVLEMINDMTNVEDEHLQHQFHRIYIHRYENVSILFADVKGFTNLSTTLSAQELVRMLNELFARFDRLAHEHHCLRIKILGDCYYCVSGLPEPRQDHAHCCVEMGLSMIKTIRYVRSRTKHDVDMRIGIHSGSVLCGVLGLRKWQFDVWSWDVDIANKLESGGIPGRIHISKATLDCLNGDYNVEEGHGKERNEFLRKHNIETYLIKQPEDSLLSLPEDIVKESVSSSDRRNSGATFTEGSWSPELPFDNIVGKQNTLAALTRNSINLLPNHLAQALHVQSGPEEINKRIEHTIDLRSGDKLRREHIKPFSLMFKDSSLEHKYSQMRDEVFKSNLVCAFIVLLFITAIQSLLPSSRVMPMTIQFSILIMLHSALVLITTAEDYKCLPLILRKTCCWINETYLARNVIIFASILINFLGAILNILWCDFDKSIPLKNLTFNSSAVFTDICSYPEYFVFTGVLAMVTCAVFLRLNSVLKLAVLLIMIAIYALLTETVYAGLFLRYDNLNHSGEDFLGTKEVSLLLMAMFLLAVFYHGQQLEYTARLDFLWRVQAKEEINEMKELREHNENMLRNILPSHVARHFLEKDRDNEELYSQSYDAVGVMFASIPGFADFYSQTEMNNQGVECLRLLNEIIADFDELLGEDRFQDIEKIKTIGSTYMAVSGLSPEKQQCEDKWGHLCALADFSLALTESIQEINKHSFNNFELRIGISHGSVVAGVIGAKKPQYDIWGKTVNLASRMDSTGVSGRIQVPEETYLILKDQGFAFDYRGEIYVKGISEQEGKIKTYFLLGRVQPNPFILPPRRLPGQYSLAAVVLGLVQSLNRQRQKQLLNENNNTGIIKGHYNRRTLLSPSGTEPGAQAEGTDKSDLP

SEQ ID NO: 237 - DNA, 2191 bp, Homo sapiens
  M15182
ggtggccgagcgggggaccgggaagcatggcccgggggtcggcggttgcctgggcggcgctcgggccgttgttgtggggctgcgcgctggggctgcagggcgggatgctgtacccccaggagagcccgtcgcgggagtgcaaggagctggacggcctctggagcttccgcgccgacttctctgacaaccgacgccggggcttcgaggagcagtggtaccggcggccgctgtgggagtcaggccccaccgtggacatgccagttccctccagcttcaatgacatcagccaggactggcgtctgcggcattttgtcggctgggtgtggtacgaacgggaggtgatcctgccggagcgatggacccaggacctgcgcacaagagtggtgctgaggattggcagtgcccattcctatgccatcgtgtgggtgaatggggtcgacacgctagagcatgaggggggctacctccccttcgaggccgacatcagcaacctggtccaggtggggcccctgccctcccggctccgaatcactatcgccatcaacaacacactcacccccaccaccctgccaccagggaccatccaatacctgactgacacctccaagtatcccaagggttactttgtccagaacacatattttgactttttcaactacgctggactgcagcggtctgtacttctgtacacgacacccaccacctacatcgatgacatcaccgtcaccaccagcgtggagcaagacagtgggctggtgaattaccagatctctgtcaagggcagtaacctgttcaagttggaagtgcgtcttttggatgcagaaaacaaagtcgtggcgaatgggactgggacccagggccaacttaaggtgccaggtgtcagcctctggtggccgtacctgatgcacgaacgccctgcctatctgtattcattggaggtgcagctgactgcacagacgtcactggggcctgtgtctgacttctacacactccctgtggggatccgcactgtggctgtcaccaagagccagttcctcatcaatgggaaacctttctatttccacggtgtcaacaagcatgaggatgcggacatccgagggaagggcttcgactggccgctgctggtgaaggacttcaacctgcttcgctggcttggtgccaacgctttccgtaccagccactacccctatgcagaggaagtgatgcagatgtgtgaccgctatgggattgtggtcatcgatgagtgtcccggcgtgggcctggcgctgccgcagttcttcaacaacgtttctctgcatcaccacatgcaggtgatggaagaagtggtgcgtagggacaagaaccaccccgcggtcgtgatgtggtctgtggccaacgagcctgcgtcccacctagaatctgctggctactacttgaagatggtgatcgctcacaccaaatccttggacccctcccggcctgtgacctttgtgagcaactctaactatgcagcagacaagggggctccgtatgtggatgtgatctgtttgaacagctactactcttggtatcacgactacgggcacctggagttgattcagctgcagctggccacccagtttgagaactggtataagaagtatcagaagcccattattcagagcgagtatggagcagaaacgattgcagggtttcaccaggatccacctctgatgttcactgaagagtaccagaaaagtctgctagagcagtaccatctgggtctggatcaaaaacgcagaaaatatgtggttggagagctcatttggaattttgccgatttcatgactgaacagtcaccgacgagagtgctggggaataaaaaggggatcttcactcggcagagacaaccaaaaagtgcagcgttccttttgcgagagagatactggaagattgccaatgaaaccaggtatccccactcagtagccaagtcacaatgtttggaaaacagcccgtttacttgagcaagactgataccacctgcgtgtcccttcctccccgagtcagggcgacttccacagcagcagaacaagtgcctcctggactgttcacggcagaccagaacgtttctggcctgggttttgtggtcatctattctagcagggaacactaaaggtggaaataaaagattttctattatggaaataaagagttggcatgaaagtcgctactg

SEQ ID NO: 238 - protein, 651 aa, Homo sapiens
  P08236
MARGSAVAWAALGPLLWGCALGLQGGMLYPQESPSRECKELDGLWSFRADFSDNRRRGFEEQWYRRPLWESGPTVDMPVPSSFNDISQDWRLRHFVGWVWYEREVILPERWTQDLRTRVVLRIGSAHSYAIVWVNGVDTLEHEGGYLPFEADISNLVQVGPLPSRLRITIAINNTLTPTTLPPGTIQYLTDTSKYPKGYFVQNTYFDFFNYAGLQRSVLLYTTPTTYIDDITVTTSVEQDSGLVNYQISVKGSNLFKLEVRLLDAENKVVANGTGTQGQLKVPGVSLWWPYLMHERPAYLYSLEVQLTAQTSLGPVSDFYTLPVGIRTVAVTKSQFLINGKPFYFHGVNKHEDADIRGKGFDWPLLVKDFNLLRWLGANAFRTSHYPYAEEVMQMCDRYGIVVIDECPGVGLALPQFFNNVSLHHHMQVMEEVVRRDKNHPAVVMWSVANEPASHLESAGYYLKMVIAHTKSLDPSRPVTFVSNSNYAADKGAPYVDVICLNSYYSWYHDYGHLELIQLQLATQFENWYKKYQKPIIQSEYGAETIAGFHQDPPLMFTEEYQKSLLEQYHLGLDQKRRKYVVGELIWNFADFMTEQSPTRVLGNKKGIFTRQRQPKSAAFLLRERYWKIANETRYPHSVAKSQCLENSPFT

SEQ ID NO: 239 - DNA, 5883 bp, Homo sapiens
  AF410459
ctaaactcgaattaagagggaaaaaaaatcagggaggaggtggcaagccacaccccacggtgcccgcgaacttccccggcagcggactgtagcccaggcagacgccgtcgagatgcagggcccaccgctcctgaccgccgcccacctcctctgcgtgtgcaccgccgcgctggccgtggctcccgggcctcggtttctggtgacagccccagggatcatcaggcccggaggaaatgtgactattggggtggagcttctggaacactgcccttcacaggtgactgtgaaggcggagctgctcaagacagcatcaaacctcactgtctctgtcctggaagcagaaggagtctttgaaaaaggctcttttaagacacttactcttccatcactacctctgaacagtgcagatgagatttatgagctacgtgtaaccggacgtacccaggatgagattttattctctaatagtacccgcttatcatttgagaccaagagaatatctgtcttcattcaaacagacaaggccttatacaagccaaagcaagaagtgaagtttcgcattgttacactcttctcagattttaagccttacaaaacctctttaaacattctcattaaggaccccaaatcaaatttgatccaacagtggttgtcacaacaaagtgatcttggagtcatttccaaaacttttcagctatcttcccatccaatacttggtgactggtctattcaagttcaagtgaatgaccagacatattatcaatcatttcaggtttcagaatatgtattaccaaaatttgaagtgactttgcagacaccattatattgttctatgaattctaagcatttaaatggtaccatcacggcaaagtatacatatgggaagccagtgaaaggagacgtaacgcttacatttttacctttatccttttggggaaagaagaaaaatattacaaaaacatttaagataaatggatctgcaaacttctcttttaatgatgaagagatgaaaaatgtaatggattcttcaaatggactttctgaatacctggatctatcttcccctggaccagtagaaattttaaccacagtgacagaatcagttacaggtatttcaagaaatgtaagcactaatgtgttcttcaagcaacatgattacatcattgagttttttgattatactactgtcttgaagccatctctcaacttcacagccactgtgaaggtaactcgtgctgatggcaaccaactgactcttgaagaaagaagaaataatgtagtcataacagtgacacagagaaactatactgagtactggagcggatctaacagtggaaatcagaaaatggaagctgttcagaaaataaattatactgtcccccaaagtggaacttttaagattgaattcccaatcctggaggattccagtgagctacagttgaaggcctatttccttggtagtaaaagtagcatggcagttcatagtctgtttaagtctcctagtaagacatacatccaactaaaaacaagagatgaaaatataaaggtgggatcgccttttgagttggtggttagtggcaacaaacgattgaaggagttaagctatatggtagtatccaggggacagttggtggctgtaggaaaacaaaattcaacaatgttctctttaacaccagaaaattcttggactccaaaagcctgtgtaattgtgtattatattgaagatgatggggaaattataagtgatgttctaaaaattcctgttcagcttgtttttaaaaataagataaagctatattggagtaaagtgaaagctgaaccatctgagaaagtctctcttaggatctctgtgacacagcctgactccatagttgggattgtagctgttgacaaaagtgtgaatctgatgaatgcctctaatgatattacaatggaaaatgtggtccatgagttggaactttataacacaggatattatttaggcatgttcatgaattcttttgcagtctttcaggaatgtggactctgggtattgacagatgcaaacctcacgaaggattatattgatggtgtttatgacaatgcagaatatgctgagaggtttatggaggaaaatgaaggacatattgtagatattcatgacttttctttgggtagcagtccacatgtccgaaagcattttccagagacttggatttggctagacaccaacatgggttacaggatttaccaagaatttgaagtaactgtacctgattctatcacttcttgggtggctactggttttgtgatctctgaggacctgggtcttggactaacaactactccagtggagctccaagccttccaaccatttttcatttttttgaatcttccctactctgttatcagaggtgaagaatttgctttggaaataactatattcaattatttgaaagatgccactgaggttaaggtaatcattgagaaaagtgacaaatttgatattctaatgacttcaaatgaaataaatgccacaggccaccagcagacccttctggttcccagtgaggatggggcaactgttctttttcccatcaggccaacacatctgggagaaattcctatcacagtcacagctctttcacccactgcttctgatgctgtcacccagatgattttagtaaaggctgaaggaatagaaaaatcatattcacaatccatcttattagacttgactgacaataggctacagagtaccctgaaaactttgagtttctcatttcctcctaatacagtgactggcagtgaaagagttcagatcactgcaattggagatgttcttggtccttccatcaatggcttagcctcattgattcggatgccttatggctgtggtgaacagaacatgataaattttgctccaaatatttacattttggattatctgactaaaaagaaacaactgacagataatttgaaagaaaaagctctttcatttatgaggcaaggttaccagagagaacttctctatcagagggaagatggctctttcagtgcttttgggaattatgacccttctgggagcacttggttgtcagcttttgttttaagatgtttccttgaagccgatccttacatagatattgatcagaatgtgttacacagaacatacacttggcttaaaggacatcagaaatccaacggtgaattttgggatccaggaagagtgattcatagtgagcttcaaggtggcaataaaagtccagtaacacttacagcctatattgtaacttctctcctgggatatagaaagtatcagcctaacattgatgtgcaagagtctatccattttttggagtctgaattcagtagaggaatttcagacaattatactctagcccttataacttatgcattgtcatcagtggggagtcctaaagcgaaggaagctttgaatatgctgacttggagagcagaacaagaaggtggcatgcaattctgggtgtcatcagagtccaaactttctgactcctggcagccacgctccctggatattgaagttgcagcctatgcactgctctcacacttcttacaatttcagacttctgagggaatcccaattatgaggtggctaagcaggcaaagaaatagcttgggtggttttgcatctactcaggataccactgtggctttaaaggctctgtctgaatttgcagccctaatgaatacagaaaggacaaatatccaagtgaccgtgacggggcctagctcaccaagtcctgtaaagtttctgattgacacacacaaccgcttactccttcagacagcagagcttgctgtggtacagccaatggcagttaatatttccgcaaatggttttggatttgctatttgtcagctcaatgttgtatataatgtgaaggcttctgggtcttctagaagacgaagatctatccaaaatcaagaagcctttgatttagatgttgctgtaaaagaaaataaagatgatctcaatcatgtggatttgaatgtgtgtacaagcttttcgggcccgggtaggagtggcatggctcttatggaagttaacctattaagtggctttatggtgccttcagaagcaatttctctgagcgagacagtgaagaaagtggaatatgatcatggaaaactcaacctctatttagattctgtaaatgaaacccagttttgtgttaatattcctgctgtgagaaactttaaagtttcaaatacccaagatgcttcagtgtccatagtggattactatgagccaaggagacaggcggtgagaagttacaactctgaagtgaagctgtcctcctgtgacctttgcagtgatgtccagggctgccgtccttgtgaggatggagcttcaggctcccatcatcactcttcagtcatttttattttctgtttcaagcttctgtactttatggaactttggctgtgatttatttttaaaggactctgtgtaacactaacatttccagtagtcacatgtgattgttttgttttcgtagaagaatactgcttctattttgaaaaaagagttttttttctttctatggggttgcagggatggtgtacaacaggtcctagcatgtatagctgcatagatttcttcacctgatctttgtgtggaagatcagaatgaatgcagttgtgtgtctatattttcccctcacaaaatcttttagaatttttttggaggtgtttgttttctccagaataaaggtattactttagaaataggtattctcctcattttgtgaaagaaatgaacctagattcttaagcattattacacatccatgtttgcttaaagatggatttccctgggaatgggagaaaacagccagcaggaggagcttcatctgttcccttcccacctccaacctagccctactgcccaccccaccccaacccaccccatgcccagtggtctcagtagatacttcttaactggaaattctttcttttcagaatctaggtggtgaattttttttaagtggcacggtctttttctgcttgaaatctgatcacaccccccagccattgccctccctctctttttcctctgtagagaaatgtgaggggcagtacatttactgtgcttttcacaccatctcagaggttgaggagcatactgaaaattgccctggggggtgctgggtgtgctgtctccttcccacatcctcagccccacaccagctctatttcaggggtgagagtcagagagcactgcaatatgtgcttcatgggatttcgattcgaagatcctagaccagggagacactgtgagccagggatacaacaaaatactaggtaagtcactgcagaccgacctccctgcagtttgggaaagaagctgggtttgtggagaatcagagcatcttgacatgactgctgacctaaagatccctggcattggccagggatcctgtggaacctcttctagttcaggggtgtgagcattagactgccagttgtctagtgacatctgatgcttgctgtgaacttttaagatccccgaatcctgagcacctcaatctttaattgccctgtattccgaagggtaatataatttatctggatggaaattttaaagatgaatcccccttttttcttttcttctctcttttctttccttctccctttcttctttgccttctaaatatactgaaatgatttagatatgtgtcaacaattaatgatcttttattcaatctaagaaatggtttagtttttctctttagctctatggcatttcactcaagtggacaggggaaaaagtaattgccatgggctccaaagaatttgctttatgtttttagctatttaaaaataaatccatcaaaaataaagtatgcaaatgtatctttt

SEQ ID NO: 240 - protein, 1445 aa, Homo sapiens
  Q8TDJ3
MQGPPLLTAAHLLCVCTAALAVAPGPRFLVTAPGIIRPGGNVTIGVELLEHCPSQVTVKAELLKTASNLTVSVLEAEGVFEKGSFKTLTLPSLPLNSADEIYELRVTGRTQDEILFSNSTRLSFETKRISVFIQTDKALYKPKQEVKFRIVTLFSDFKPYKTSLNILIKDPKSNLIQQWLSQQSDLGVISKTFQLSSHPILGDWSIQVQVNDQTYYQSFQVSEYVLPKFEVTLQTPLYCSMNSKHLNGTITAKYTYGKPVKGDVTLTFLPLSFWGKKKNITKTFKINGSANFSFNDEEMKNVMDSSNGLSEYLDLSSPGPVEILTTVTESVTGISRNVSTNVFFKQHDYIIEFFDYTTVLKPSLNFTATVKVTRADGNQLTLEERRNNVVITVTQRNYTEYWSGSNSGNQKMEAVQKINYTVPQSGTFKIEFPILEDSSELQLKAYFLGSKSSMAVHSLFKSPSKTYIQLKTRDENIKVGSPFELVVSGNKRLKELSYMVVSRGQLVAVGKQNSTMFSLTPENSWTPKACVIVYYIEDDGEIISDVLKIPVQLVFKNKIKLYWSKVKAEPSEKVSLRISVTQPDSIVGIVAVDKSVNLMNASNDITMENVVHELELYNTGYYLGMFMNSFAVFQECGLWVLTDANLTKDYIDGVYDNAEYAERFMEENEGHIVDIHDFSLGSSPHVRKHFPETWIWLDTNMGYRIYQEFEVTVPDSITSWVATGFVISEDLGLGLTTTPVELQAFQPFFIFLNLPYSVIRGEEFALEITIFNYLKDATEVKVIIEKSDKFDILMTSNEINATGHQQTLLVPSEDGATVLFPIRPTHLGEIPITVTALSPTASDAVTQMILVKAEGIEKSYSQSILLDLTDNRLQSTLKTLSFSFPPNTVTGSERVQITAIGDVLGPSINGLASLIRMPYGCGEQNMINFAPNIYILDYLTKKKQLTDNLKEKALSFMRQGYQRELLYQREDGSFSAFGNYDPSGSTWLSAFVLRCFLEADPYIDIDQNVLHRTYTWLKGHQKSNGEFWDPGRVIHSELQGGNKSPVTLTAYIVTSLLGYRKYQPNIDVQESIHFLESEFSRGISDNYTLALITYALSSVGSPKAKEALNMLTWRAEQEGGMQFWVSSESKLSDSWQPRSLDIEVAAYALLSHFLQFQTSEGIPIMRWLSRQRNSLGGFASTQDTTVALKALSEFAALMNTERTNIQVTVTGPSSPSPVKFLIDTHNRLLLQTAELAVVQPMAVNISANGFGFAICQLNVVYNVKASGSSRRRRSIQNQEAFDLDVAVKENKDDLNHVDLNVCTSFSGPGRSGMALMEVNLLSGFMVPSEAISLSETVKKVEYDHGKLNLYLDSVNETQFCVNIPAVRNFKVSNTQDASVSIVDYYEPRRQAVRSYNSEVKLSSCDLCSDVQGCRPCEDGASGSHHHSSVIFIFCFKLLYFMELWL

SEQ ID NO: 241 - DNA, 1534 bp, Homo sapiens; identical to SEQ ID NO: 227
  AB034951

SEQ ID NO: 242 - protein, 646 aa, Homo sapiens; identical to SEQ ID NO: 228
  P11142

SEQ ID NO: 243 - DNA, 2287 bp, Homo sapiens
  M23725
ggctgaggcagtggctccttgcacagcagctgcacgcgccgtggctccggatcttcttcgtctttgcagcgtagcccgagtcggtcagcgccagaggacctcagcagccatgtcgaagccccatagtgaagccgggactgccttcattcagacccagcagctgcacgcagccatggctgacacattcctggagcacatgtgccgcctggacattgattcaccacccatcacagcccggaacactggcatcatctgtaccattggcccagcttcccgatcagtggagacgttgaaggagatgattaagtctggaatgaatgtggctcgtctgaacttctctcatggaactcatgagtaccatgcggagaccatcaagaatgtgcgcacagccacggaaagctttgcttctgaccccatcctctaccggcccgttgctgtggctctagacactaaaggacctgagatccgaactgggctcatcaagggcagcggcactgcagaggtggagctgaagaagggagccactctcaaaatcacgctggataacgcctacatggaaaagtgtgacgagaacatcctgtggctggactacaagaacatctgcaaggtggtggaagtgggcagcaagatctacgtggatgatgggcttatttctctccaggtgaagcagaaaggtgccgacttcctggtgacggaggtggaaaatggtggctccttgggcagcaagaagggtgtgaaccttcctggggctgctgtggacttgcctgctgtgtcggagaaggacatccaggatctgaagtttggggtcgagcaggatgttgatatggtgtttgcgtcattcatccgcaaggcatctgatgtccatgaagttaggaaggtcctgggagagaagggaaagaacatcaagattatcagcaaaatcgagaatcatgagggggttcggaggtttgatgaaatcctggaggccagtgatgggatcatggtggctcgtggtgatctaggcattgagattcctgcagagaaggtcttccttgctcagaagatgatgattggacggtgcaaccgagctgggaagcctgtcatctgtgctactcagatgctggagagcatgatcaagaagccccgccccactcgggctgaaggcagtgatgtggccaatgcagtcctggatggagccgactgcatcatgctgtctggagaaacagccaaaggggactatcctctggaggctgtgcgcatgcagaacctgattgcccgtgaggcagaggctgccatctaccacttgcaattatttgaggaactccgccgcctggcgcccattaccagcgaccccacagaagccaccgccgtgggtgccgtggaggcctccttcaagtgctgcagtggggccataatcgtcctcaccaagtctggcaggtctgctcaccaggtggccagataccgcccacgtgcccccatcattgctgtgacccggaatccccagacagctcgtcaggcccacctgtaccgtggcatcttccctgtgctgtgcaaggacccagtccaggaggcctgggctgaggacgtggacctccgggtgaactttgccatgaatgttggcaaggcccgaggcttcttcaagaagggagatgtggtcattgtgctgaccggatggcgccctggctccggcttcaccaacaccatgcgtgttgttcctgtgccgtgatggaccccagagcccctcctccagcccctgtcccacccccttcccccagcccatccattaggccagcaacgcttgtagaactcactctgggctgtaacgtggcactggtaggttgggacaccagggaagaagatcaacgcctcactgaaacatggctgtgtttgcagcctgctctagtgggacagcccagagcctggctgccccatcatgtggccccacccaatcaagggaagaaggaggaatgctggactggaggcccctggagccagatggcaagagggtgacagcttcctttcctgtgtgtactctgtccagttcctttagaaaaaatggatgcccagaggactcccaaccctggcttggggtcaagaaacagccagcaagagttaggggccttagggcactgggctgttgttccattgaagccgactctggccctggcccttacttgcttctctagctctctaggcctctccagtttgcacctgtccccaccctccactcagctgtcctgcagcaaacactccaccctccaccttccattttcccccactactgcagcacctccaggcctgttgccgc

SEQ ID NO: 244 - protein, 531 aa, Homo sapiens
  P14786
MSKPHSEAGTAFIQTQQLHAAMADTFLEHMCRLDIDSPPITARNTGIICTIGPASRSVETLKEMIKSGMNVARLNFSHGTHEYHAETIKNVRTATESFASDPILYRPVAVALDTKGPEIRTGLIKGSGTAEVELKKGATLKITLDNAYMEKCDENILWLDYKNICKVVEVGSKIYVDDGLISLQVKQKGADFLVTEVENGGSLGSKKGVNLPGAAVDLPAVSEKDIQDLKFGVEQDVDMVFASFIRKASDVHEVRKVLGEKGKNIKIISKIENHEGVRRFDEILEASDGIMVARGDLGIEIPAEKVFLAQKMMIGRCNRAGKPVICATQMLESMIKKPRPTRAEGSDVANAVLDGADCIMLSGETAKGDYPLEAVRMQNLIAREAEAAIYHLQLFEELRRLAPITSDPTEATAVGAVEASFKCCSGAIIVLTKSGRSAHQVARYRPRAPIIAVTRNPQTARQAHLYRGIFPVLCKDPVQEAWAEDVDLRVNFAMNVGKARGFFKKGDVVIVLTGWRPGSGFTNTMRVVPVP

SEQ ID NO: 245 - DNA, 6005 bp, Homo sapiens; identical to SEQ ID NO: 235
  Z35309

SEQ ID NO: 246 - protein, 1251 aa, Homo sapiens; identical to SEQ ID NO: 236
  P40145

SEQ ID NO: 247 - DNA, 6196 bp, Homo sapiens
  D25538
tgaggaactgcgtgtggagtcagcccagtctggatgcacaggaggatgctggcggcacagtgagtgaggcctggtgccagagctgtgcggaccccttgttggccatggagcagcaggcccagaggccctctccccagccctgcttgcctgcctcggagaggacagaggcctaggcccacgggggagggtgttggcagacagatgccctccaggccctggggcctccttaacggccccttaacgacacgcgtgccaagggtggaggatgccagccaaggggcgctacttcctcaacgagggcgaggagggccctgaccaagatgcgctctacgagaagtaccagctcaccagccagcatgggccgctgctgctcacgctcctgctggtggccgccactgcctgcgtggccctcatcatcattgccttcagccagggggacccctccagacaccaggccattctgggcatggcgttcctggtgctggcggtgtttgcggccctctctgtgctgatgtacgtcgagtgtctcctgcggcgctggctcagggccttggcgctgctcacctgggcctgcttggtggcgctgggctatgtgctggtgttcgacgcatggacaaaggcggcctgtgcgtgggagcaggtgcccttcttcctgttcattgtcttcgtggtgtacacactactgcccttcagcatgcggggcgctgtcgccgttggggccgtctccactgcctcccacctcctggtgctcggttctttgatgggaggcttcacgacacccagtgtccgggtggggctgcagctgctggccaacgcagtcatcttcctgtgtgggaacctgacaggcgccttccacaagcaccaaatgcaggatgcgtcccgggacctcttcacctacactgtgaagtgcatccagatccgccggaagctgcgcatcgagaagcgccagcaggagaacctgctgctgtcagtgcttccggcccacatctccatgggcatgaagctggccatcatcgaacggctcaaggagcatggtgaccgtcgctgcatgcctgacaacaacttccacagcctctacgtcaagaggcaccagaatgtcagcatcctctatgcggacatcgtgggcttcacgcagctggccagcgactgttctcccaaggagctggtggtggtgctgaatgagctctttggcaagttcgaccagatcgccaaggccaacgagtgcatgcgaatcaagatcctcggcgactgctactactgtgtatcgggcctgcccgtgtcgctgcctacccacgcccggaactgcgtgaagatggggctggacatgtgccaggccatcaagcaggtgcgggaggccacgggcgtggacatcaacatgcgtgtgggcatacactcggggaatgtgctgtgcggggtcatcgggctgcgcaagtggcagtatgacgtgtggtcccacgacgtgtccctggccaaccggatggaggcagccggagtacccggccgggtgcacatcacggaggccacgctaaagcacctggacaaggcgtacgaggtggaggatgggcacgggcagcagcgggacccctacctcaaggagatgaacatccgcacctacctggtcatcgacccccggagccagcagccacccccgcccagccaacacctccccaggcccaagggggacgcggccctgaagatgcgggcgtcagtgcgcatgacccggtacctcgagtcctggggggcggcacggccctttgcacatctcaaccaccgtgagagcgtgagcagtggtgagacccacgtccccaacgggcggaggcctaagagcgttccccagcgccaccgccggaccccagacagaagcatgtcccccaaggggcggtcggaggatgactcgtacgatgacgagatgctgtcagccattgaggggctcagctccacgaggccctgctgctccaagtccgatgacttctacacctttgggtccatcttcctggagaagggctttgagcgcgagtaccgcctggcacccatcccccgggcccgccacgactttgcctgcgccagcctgatcttcgtctgcatcctgctcgtccatgtcctgctcatgcccaggacggcggcactgggtgtgtccttcgggctggtggcctgtgtactggggctggtgctgggcctgtgctttgccaccaagttctcgaggtgctgcccagctcgggggacgctctgcactatctctgagagggtggagacacagcccctgctgaggctgaccctggccgtcctgaccatcggcagcctgctcactgtggccatcatcaacctgcccctgatgcctttccaagttccagagctgcctgttggcaatgagacaggcctactggccgcgagcagcaagacaagagccctgtgtgagcccctcccgtactacacctgcagctgtgtcctgggcttcatcgcctgctcggtcttcctgaggatgagcctggagccaaaggttgtgctgctgacagtggccctggtggcctacctggtgctcttcaacctctccccatgctggcagtgggactgctgcggccaaggcctgggcaacctcaccaagcccaacggcaccaccagtggcacccctagctgttcctggaaggacctgaagaccatgaccaatttctacctggtcctgttctacatcaccctgcttacactctccagacagattgactattactgccgcttggactgcctatggaagaagaagttcaagaaggagcacgaggagtttgagaccatggagaacgtgaaccgccttcttctggagaacgtcctgccagcccacgtggctgcccactttatcggtgacaagttaaacgaggactggtaccatcagtcctatgactgcgtctgtgtcatgtttgcctccgtgccggacttcaaagtgttctacacagagtgcgatgtcaacaaagaagggctggagtgcctacgcctgctcaatgagatcattgccgacttcgacgagctcctactgaagcccaagttcagcggcgtggagaagatcaagaccatcggcagcacgtacatggcagctgcagggctcagcgtcgcctcagggcacgagaaccaggagctggagcggcagcatgcccacattggtgtcatggtggagttcagcatcgccctgatgagtaagctggacggcatcaacaggcactccttcaactccttccgcctccgcgtcggcataaaccatgggcctgtgattgctggagtgattggggcccgaaaacctcagtatgacatctggggaaacactgtcaatgtggccagccgaatggaaagcactggagaacttgggaaaatccaggttaccgaggagacctgcaccatcctccagggcctcgggtactcttgtgaatgccgtggcctgatcaacgtcaaaggcaaaggcgagctgaggacttactttgtctgtacggacactgccaagtttcaggggctggggctgaactgagggctcctgctggattccgaaaaggccgggaagccagtctccttccctgaagcaagcccaggagaagactctccgccccacgccaatcccaaaggcatgcagatggctgtgcatgttggcttctttggacctgcactggaggatttctcagacacatgcaccagattctggctcgaagcagccactgagccataatgcgcaggggaggccagaagctctgtgcctggtctgtaacagtttccaggccagctggagaatgttcactggttcggggctgactttgagatctttgttccctgaggtgccaggcaggcaactttagcacatgatgaaaacagacttccacctcagtggcctgtgggcacgcacaagtgaggtctgtttttctagacaccaagggggagtaagctgagctgtctagcacggattggagactccctctccctggtgggcctggcaatgacagcatttctcacagaggcattctggtaaatgaagctgaaaggggtgttttacatctgtaaacggtttcaaacaggtagagagaaaaacaccacaattaacactgttactttttgccttgtctggcatgtttgttttaaatgaatacattaatggggtttttatccttttgaatgacttttcagacactagacataaatctcttccctccagtgtatgctctgcctttttaaccactgacatgtaaggaggactactgtctagcatcagcttatggggtcagctggctgtggggatagagtcctgaggaatgtggtcacagcaagaaggcggggagcagcagagccttgcctttgaatgaggcagcttgtgaggcaagcattctggagagaggtgctttgaaagtaaggtgcggcctttcacctcttccttgattactcacacatctttgcgttctcccctgccgtccttcaactgtatcttacttttcttaccagaaaggaatggagtctgtttagagacaacttggacaacctgtgagtgcatctcttctttcctttagtcttcacagctaactctggagagcttcaaaactagaaggatctactccgcatgggtgcatgcagaggctcctggatctgggaagcccgccccctcacaaatgctgagccgttcttgctctgaaactgcgtgagtcaaggcaaatgcaaaaagccaggttttggggatgtgtcttactgtgcttcaacttcccaaggaattgaaagtcaacctaactgtaacaacagggtgagaaatgaccaaactgcccgtgactttttctgaatggacttcataaccggaagacttaaccggtggcctcatcaccagagcatcgccaggatttctaatgcactcagtttccctacatagcagggattcttagctaggtgtccccatgaaccccgtaaagttctacacaaagtcttgcatacaggagcctttacaagatgattatacagggttgcagattgggtgactgaccagacttgttggggtcctgggatgagttgccccgggctgcaaattaagagtacagctaagtgcgggggtggcggtggagggaacgaaaattgaacctgtctgcctgtgctgtgtcgtgtggctttatcagcccgaggaagggcaggtgtattctaatttgcacaaaggtgctgggtagactagtggcagctctcatgtgctgcacataagtggaatcagtatgaatagaagaacttgctgtataaaggaatttcatggcaacaatgctggtaagggcaattagcctcgcttaagttgccttttttacacaccaaaactttttacatgaagggctggtttcacatgaatactatactgaaatctgtgccacaccaaaactttttacatgaagggctggtttcacatgaatactatactgaaatctgtgctctcaagatctagcagtgaccagggctgcccggcgggggctctcctggcaagtcaggaaggtttctgttgctaatataacatagaaacacattagtgcactgggcctctctgaggtcagcatatttgtactcttggaatatttgtttttttcttcagtaacaacagaaaccccagttgggagtttaacaaataactgactaccactcactcatgcatttttatttccaattaaagcaaagcactgtgctgtgctcagataataatagtttgtaagtaaaagtttttagttttcagtgttcaggttatagaatataactgaccataaaaattacctgcaggtattttctttttatgaacttgtttttaaattaccaagtaattactggtgtcattttgttttatgacagacacacgtatctaacaaacaaacaaacagtgaccttctccatgggtcaaggacttccttacaatttctcctgagttaacttttgtgaaaataatacctaaggttttctggcttattgaggaaatttcctaacaaacaaacaaacaaacaaacagaagagaagatcattaaccactgtatactttgtgtatataataggtcagtgtaaagaaatatgatttgaggtggtgcatgcaagtaactagggtttattctatataatgaatatttatagatctgtaacatttgtttcaaaatgctgtttcatttttataaagtaccagtgtttagctgctttttatacattaaattagcaatttgaaaaactc

SEQ ID NO: 248 - protein, 1080 aa, Homo sapiens
  P51828
MPAKGRYFLNEGEEGPDQDALYEKYQLTSQHGPLLLTLLLVAATACVALIIIAFSQGDPSRHQAILGMAFLVLAVFAALSVLMYVECLLRRWLRALALLTWACLVALGYVLVFDAWTKAACAWEQVPFFLFIVFVVYTLLPFSMRGAVAVGAVSTASHLLVLGSLMGGFTTPSVRVGLQLLANAVIFLCGNLTGAFHKHQMQDASRDLFTYTVKCIQIRRKLRIEKRQQENLLLSVLPAHISMGMKLAIIERLKEHGDRRCMPDNNFHSLYVKRHQNVSILYADIVGFTQLASDCSPKELVVVLNELFGKFDQIAKANECMRIKILGDCYYCVSGLPVSLPTHARNCVKMGLDMCQAIKQVREATGVDINMRVGIHSGNVLCGVIGLRKWQYDVWSHDVSLANRMEAAGVPGRVHITEATLKHLDKAYEVEDGHGQQRDPYLKEMNIRTYLVIDPRSQQPPPPSQHLPRPKGDAALKMRASVRMTRYLESWGAARPFAHLNHRESVSSGETHVPNGRRPKSVPQRHRRTPDRSMSPKGRSEDDSYDDEMLSAIEGLSSTRPCCSKSDDFYTFGSIFLEKGFEREYRLAPIPRARHDFACASLIFVCILLVHVLLMPRTAALGVSFGLVACVLGLVLGLCFATKFSRCCPARGTLCTISERVETQPLLRLTLAVLTIGSLLTVAIINLPLMPFQVPELPVGNETGLLAASSKTRALCEPLPYYTCSCVLGFIACSVFLRMSLEPKVVLLTVALVAYLVLFNLSPCWQWDCCGQGLGNLTKPNGTTSGTPSCSWKDLKTMTNFYLVLFYITLLTLSRQIDYYCRLDCLWKKKFKKEHEEFETMENVNRLLLENVLPAHVAAHFIGDKLNEDWYHQSYDCVCVMFASVPDFKVFYTECDVNKEGLECLRLLNEIIADFDELLLKPKFSGVEKIKTIGSTYMAAAGLSVASGHENQELERQHAHIGVMVEFSIALMSKLDGINRHSFNSFRLRVGINHGPVIAGVIGARKPQYDIWGNTVNVASRMESTGELGKIQVTEETCTILQGLGYSCECRGLINVKGKGELRTYFVCTDTAKFQGLGLN

SEQ ID NO: 249 - DNA, 5182 bp, Homo sapiens
  AB023198
accttcagttcctccaagtcctggaagactgagacaaggggaagaaagcaagataagtgcgatggatgcatctccacggaatatttctccaggacttcagaatggagaaaaagaggatcgcttcttaacaactttgtccagccagagctccaccagttctactcatctccaattgcctacgccacctgaagtcatgtctgaacagtcagtgggagggccccctgagctagatacagccagcagttccgaagatgtgtttgatgggcatttgctgggatccacagacagccaagtgaaggaaaagtcaaccatgaaagccatctttgcaaatttgcttccaggaaatagctataatcctattccatttccttttgatccagataaacactacttaatgtatgaacatgaacgagtgcccattgcagtctgcgagaaggaacccagctccatcattgcttttgctctcagttgtaaagaataccgaaatgccttagaggaattgtctaaagcgactcagtggaacagtgccgaagaagggcttccaacaaatagtacttcagatagcagaccaaagagtagcagccctatcagattacctgaaatgagtggaggacagacaaatcgtacaacagaaacagaaccacaaccaaccaaaaaggcttctggaatgttgtccttcttcagagggacagcagggaaaagccccgatctctcttcccagaagagagagaccttacgtggagcagatagtgcttactaccaggttgggcagacaggcaaggaggggaccgagaatcaaggcgttgagcctcaagatgaagtagatggaggagatacgcaaaagaagcaactcataaatcctcatgtggaacttcaattttcagatgctaatgccaagttttactgtcggctctactatgcgggagagtttcataagatgcgtgaagtgattctggacagcagtgaggaagatttcattcgttccctctcccactcatcaccctggcaggcccggggaggcaaatcaggagctgccttctatgcaactgaggatgatagatttattttgaagcaaatgcctcgtctggaagtccagtccttcctcgactttgcaccacattacttcaattatattacaaatgctgttcaacaaaagaggcccacggcgttggccaaaattcttggagtttacagaattggttataagaactctcagaacaacactgagaagaagttagatctccttgtcatggaaaatcttttctacgggagaaagatggcacaggtttttgatttgaagggctctcttaggaatcggaatgtaaaaactgacactggaaaagagagttgtgatgtggtcctgctagatgaaaatctcctaaagatggttcgagacaaccctctatatattcgttctcattccaaagctgtgctgagaacctcgatccatagtgactcccatttcctttctagccacctcattatagattattctttgctggttgggcgagatgatactagcaatgagctagtagttggaattatagattatattcgaacatttacatgggacaaaaagcttgagatggttgtgaaatcaacaggaattttaggtggacaaggtaaaatgccaacagtggtgtctccggagttgtacaggactaggttttgtgaggcaatggacaagtatttcctaatggtaccagaccactggacaggcttgggtctgaattgctgaaatcaagcacatattttgaaatggactgtgaaggaaaaggggacaggaacaaaggaccaaaaataagctacatgttttatttcttcatcgtgttcaccactgtatgccaaggcttttcagttctgtgtctgtttagactgtccgtaatggaatggtaaaactccatgaatttgcactttggtttttgatacctgtggagctgtctgtacgttgggaagtggcatgaaaattttcttaagctaaaatacagacatgtttcaaagggctaaagttggagatgagtagatagggtgaaaaatgggttaaatttgctagcttaattgttttaagaagaaaacagtgtctcataaattgactatcctggcatcacatttaacatgttatctacttagaaagcatttgtagagctgctgaatttgttttgtgtttttctgtaataatttaatgttacttattatcagaatttctgaaacctttacaaaaattctgatttattccattaatggccagttaaacacgtgggcatttattgttttattgaggaatttgacttaaactgggaatcctgtcatgttgtttatctttccagcttgcctgtttttgagtatgtttgatgtttttaaaattttgtcttctctgtggatgacaggaggctacagcaattaactttaagcctccttttagagatatttttaaagcttgtttaaaatttttgtgcaattcatatattaaattgcacttacttgcatacgctcatattctagggttttttctctatttttagggtatcatagtaaatcattagtaaatgagtctgtagttactaaaccctaatggaataattattaatgaaagatttttgaaatataaaaaataaattaggcccaatccaagaaattgagtgagaaggaaacacttgttttattcacagaggtaaagtgtcttttcaatataaccagcaatttaggtggcatctataaaataaaaaatttctactgtggacatccccttttccaactttctacataatggctagttctgactactaagaaatgttaagaaataggccaagtgcggtggctcacgcctataatcctatcactttgggaggcctaggcaggcagatcacctgaggtcaggagttcaagaccagcctggccaacatgaggaaaccccatctctactaaaaagacaaaaaattagctgggcatggtggcatatacctgtaaccccaactacttgggtggctgaggcaggagaattgtttgaacctgggaggcggaggctgcagtgagctgggattacaccattgcattccagcctgggcaacagagcaagactgtctcaaaaaacaaaacgaaacaaaaaaagaaagttattcttagtaaggaacttcttgtttaatagcatttttgtttattttaaaaagtgatcagaagtagtaaactatctttgaggaaatactgtaaccccagaatatttcctcttgacttctttttgtaacaaggataatttagggatttataaagttgtaaggatttcactgttttcggactgcctataataatagcacattaaccttcacataataagaaatctggacaagttcagttacacagtatgatgaatacttgaattaggaacattgtggaaaatttgctttagagaatcaaggcagtagtttggtatttggtgcttattaaaaatgtggtttgttttgaactggaagcaagttgaccaaggacttatgactaatgtgatgctaagttccacttggccccttttaaaaacgtgtatgtgccttttgaagatacacaaaacactgaggattttagttttgaaatcaaagactattaaaggagctgtacagaggtaaaaaaataaatgtggaacattattaacttattttgtgtctaggaacaatggattttgtatctgatttaaaatgccaacactgttttgtctctgttcattttttctgtgaggatacttaaggttattattcctgtctgtttcctgtactcccctagtcatgagcacttgaagtacaaggtgtctccccctaggtgcaattaggttgtttctttgtttttagtttcaattctatgtgcatagcaggaatgctccacaggaatggcttctgacaataatctgtcctgttgattttgttttccttgcccatgacttgaacaactgtgttttaaagtactgtagtctagtaggtaactttgtggcaaaaattttcaatataatacattctgaaacaatagttgctgccttgcaaaggtaatctctcattttaaaattggacagtattaatgaaggggaaatatacaatttatttctattgagtggtagaactatatgtctggtcccttgctgctcttgtttaggccactatcatagatatatttcaaatattgtactactcagtgttaagtattgaatgactgtttccctttccttcaaggcctagagtatattctgaaaatttaggaatgaggaagaaatcttaatacttccttccttaacatacaacatgagtcccgagaataattgatagtagcaagagaaaactatgtcagtaacatgttgctttgtataaaaatcttatttataaatgtgaagctttttgatgccatcaaaacttattaaaaaataggatttacttttttctaattctgacctaagaaaaataatgagaacaagctgttgcaagctcttttgtagtctattgaatattttatagatattcaaaatttcctacaaactataattttttccatgatttagcagtgagtgattttctagctttggctcttattaggtattgtaaatagtagggttatatcgatatcagcttttgtgatggcattgtggtcatcagcttcatgacattttacccatttgcagtgatcctgtgtaaaactgccaaggaaagtaattacctgtaggagtttgctgagcttgaagagtgaaaactgttgtgaatgagcctgatcataaaacggaccaggccattcattattcctcaagtgttaatatactgacttatgcagtattcaaaccatctagtgcaatgtttttgtttttgttttttttttttttggtaacacaggtgcagtgtattatagaaaaaataaaaactacaatcattagcagttttaatactgctgtgtcagttttgtaaaaaatgtacattatgtcttttgacatgttgaattttaaactagggaaatgacattgtaaatcatagtagcctcttttaatttaatatgaaaaatgccactatattgaaagtacttaatgtattgtatatatttctctactttggttctagctattttatatgattgacatgttatttaaaagataactgccttgaacttttggagacttgtactgtaaataaagaaatcttaacaataaactcagaatctactt

SEQ ID NO: 250 - protein, 578 aa, Homo sapiens
  Q9Y217
PSVPPSPGRLRQGEESKISAMDASPRNISPGLQNGEKEDRFLTTLSSQSSTSSTHLQLPTPPEVMSEQSVGGPPELDTASSSEDVFDGHLLGSTDSQVKEKSTMKAIFANLLPGNSYNPIPFPFDPDKHYLMYEHERVPIAVCEKEPSSIIAFALSCKEYRNALEELSKATQWNSAEEGLPTNSTSDSRPKSSSPIRLPEMSGGQTNRTTETEPQPTKKASGMLSFFRGTAGKSPDLSSQKRETLRGADSAYYQVGQTGKEGTENQGVEPQDEVDGGDTQKKQLINPHVELQFSDANAKFYCRLYYAGEFHKMREVILDSSEEDFIRSLSHSSPWQARGGKSGAAFYATEDDRFILKQMPRLEVQSFLDFAPHYFNYITNAVQQKRPTALAKILGVYRIGYKNSQNNTEKKLDLLVMENLFYGRKMAQVFDLKGSLRNRNVKTDTGKESCDVVLLDENLLKMVRDNPLYIRSHSKAVLRTSIHSDSHFLSSHLIIDYSLLVGRDDTSNELVVGIIDYIRTFTWDKKLEMVVKSTGILGGQGKMPTVVSPELYRTRFCEAMDKYFLMVPDHWTGLGLNC

SEQ ID NO: 251 - DNA, 3244 bp, Homo sapiens
  AL136679
agtgacaattaaagatggctgcgcccatgtaacatcactagcgaccggtgacctctttttcccccttgcctggctcctgtggtggcaggctgggcacgaggaccatgctgggccggagcctccgagaagtttctgcggcactgaaacaaggccaaattacaccaacagagctctgtcaaaaatgtctctctcttatcaagaaggccaagtttctaaatgcctacattactgtgtcagaagaggtggccttaaaacaagctgaagaatcagaaaagagatataagaatggacagtcacttggggatttagatggaattcctattgcagtaaaagacaatttcagcacttctggcattgagacaacatgtgcatcaaatatgctgaaaggttatataccaccttataatgctacagtagttcagaagttgttggatcagggagctctactaatgggaaaaacaaatttagatgagtttgctatgggatctgggagcacagatggtgtatttggaccagttaaaaacccctggagttattcaaaacgatatagagaaaagaggaagcagaatccccacagcgagaatgaagattcagactggctgataactggaggaagcccaggtgggagtgcagctgctgtatcggcgttcacatgctacgcggctttaggatcagatacaggaggatcgaccagaaatcctgctgcccactgtgggcttgttggtttcaaaccaagctatggcttagtttcccgtcatggtctcattcccctggtgaattcgatggatgtgccaggaatcttaaccagatgtgtggatgatgcagcaattgtgttgggtgcactggccggacctgaccccagggactctaccacagtacatgaacctattaataaaccattcatgcttcccagtttggcagatgtgagcaaactatgtataggaattccaaaggaatatcttgtaccggaattatcaagtgaagtacagtctctttggtccaaagctgctgacctctttgagtctgagggggccaaagtaattgaagtatcccttcctcacaccagttattcaattgtctgctaccatgtattgtgcacatcagaagtggcatcgaatatggcaagatttgatgggctacaatatggtcacagatgtgacattgatgtgtccactgaagccatgtatgctgcaaccagacgagaaggatttaatgatgtggtgagaggaagaattctctcaggaaactttttcttattaaaagaaaactatgaaaattattttgtcaaagcacagaaagtgagacgcctcattgctaatgactttgtaaatgcttttaactctggagtagatgtcttgctaactcccaccaccttgagtgaggcagtaccatacttggagttcatcaaagaggacaacagaacccgaagtgcccaggatgatatttttacacaagctgtaaatatggcaggattgccagcagtgagtatccctgttgcactctcaaaccaagggttgccaataggactgcagtttattggacgtgcgttttgtgaccagcagcttcttacagtagccaaatggtttgaaaaacaagtacagtttcctgttattcaacttcaagaactcatggatgattgttcagcagtccttgaaaatgaaaagttagcctctgtctctctaaaacagtaaacatatcttacaaattaaaatgacttttaggctgggtgcagtggctcacacctgtaatcccagcactttgggaggccaaggcgagcggatcatgaggtcagaagatctagaacagcctggtcaacatggtgaaaccccgtctctactaaaaatacaaaaattagccaggcttagtggcgggcatctgtagtcccagctactcaggaggctgaggcaggagaatcacttgaaccctggaggtggaggttgcagtgagccgagatcatgccactgcactgcactccagcctgggtgacaaagcaagactgtgtctcaaaataaataaataaaataaaataaaatgacgtacagagattctatattctagagagtcaaatggtcttgctcaattcttgtaattaggttcttgttaatacagtcattccatggaattactttttaaaattcctgtgacaattaataataaataacgtgtcagcatttagtaagcatccactaagtgtacaatacttctacaataacacaagatacctgttcctcaaagacaatgcattctgccataatgttcattaaagagtttacagtaaaaataagattagggataaacttctcaaaaattgtacatctgtgtaactaaagcactaacaaaaacatgaatagtccttctagaggtaacttggatagcctaggcaggcaacttatcatgtggtgaaggccgcctcaggggttgttaaaaatgcacagaaacaattgagtgcgattattggcttctgagcgctgagcagagcaggtggaagaggaactttgagcacaggaggaaatgcaaccagtcagggcccagaatcatgcaaatctcaggggtatgcctctctggggaggagctccacttgcagggactccttttatttccctaagaaagagctgaaatgactgagaactttcctttcctccttagagttacaattttacttctgctattccggagcccatgcctagaagccagaacaactccatgttacactgagttcatgctcctatttactgatcacaaatgagctcattaatgtcatcgaaacatttattgtaacctaacagaccatcacagattggaaacttggtagatagcagagcatggtattagtgaaaaaggttcaaaatacacaagtaacatacactctgaaaaacatgcagataatttgctgatgaagcagaagaggggatgcgcatggcaagaacttgccttaccccagattctctatatctcatggtttccttttcctcttgactgtctttacgagtgttttttatttgggaccctcgagcccagagatattaatggatatctgtattcaatatttgacaaaatctaatggaaaccatccatttactcatgataaggcttcatcactggatttctgtgtcttcactagaacaccattgtcatctcatattgatcaggtattttaatctagcacttacatattgttgataaatgaaagctgaattgttacttaataaattcactttgtttagcaaaaaaaaaaaaaaaaaaa

SEQ ID NO: 252 - protein, 528 aa, Homo sapiens
  Q9H0R6
MLGRSLREVSAALKQGQITPTELCQKCLSLIKKAKFLNAYITVSEEVALKQAEESEKRYKNGQSLGDLDGIPIAVKDNFSTSGIETTCASNMLKGYIPPYNATVVQKLLDQGALLMGKTNLDEFAMGSGSTDGVFGPVKNPWSYSKRYREKRKQNPHSENEDSDWLITGGSPGGSAAAVSAFTCYAALGSDTGGSTRNPAAHCGLVGFKPSYGLVSRHGLIPLVNSMDVPGILTRCVDDAAIVLGALAGPDPRDSTTVHEPINKPFMLPSLADVSKLCIGIPKEYLVPELSSEVQSLWSKAADLFESEGAKVIEVSLPHTSYSIVCYHVLCTSEVASNMARFDGLQYGHRCDIDVSTEAMYAATRREGFNDVVRGRILSGNFFLLKENYENYFVKAQKVRRLIANDFVNAFNSGVDVLLTPTTLSEAVPYLEFIKEDNRTRSAQDDIFTQAVNMAGLPAVSIPVALSNQGLPIGLQFIGRAFCDQQLLTVAKWFEKQVQFPVIQLQELMDDCSAVLENEKLASVSLKQ

SEQ ID NO: 253 - DNA, 2853 bp, Homo sapiens
  AL031428
cggcgcgcgggcagcgtgaagcgaggcgaggcaaggcttttcggacccacggagcgacagagcgagcggcccctacggccgtcggcggcccggcggcccgagatgttatctgggaagaaggcggcagccgcggcggcggcggctgcagcggcagcaaccgggacggaggctggccctgggacagcaggcggctccgagaacgggtctgaggtggccgcgcagcccgcgggcctgtcgggcccagccgaggtcgggccgggggcggtgggggagcgcacaccccgcaagaaagagcctccgcgggcctcgccccccgggggcctggcggaaccgccggggtccgcagggcctcaggccggccctactgtcgtgcctgggtctgcgacccccatggaaactggaatagcagagactccggaggggcgtcggaccagccggcgcaagcgggcgaaggtagagtacagagagatggatgaaagcttggccaacctctcagaagatgagtattattcagaagaagagagaaatgccaaagcagagaaggaaaagaagcttcccccaccaccccctcaagccccacctgaggaagaaaatgaaagtgagcctgaagaaccatcggggcaagcaggaggacttcaagacgacagttctggagggtatggagacggccaagcatcaggtgagggtggcattagatgcttgccacttagtagcaagagccgccaagtaggaattgatgcttgcaagtgtttttggctgtggtatccacattttagccagaagcgcagatgtcctttgctttcttcgttaggtgtggagggcgcagctttccagagccgacttcctcatgaccggatgacttctcaagaagcagcctgttttccagatattatcagtggaccacaacagacccagaaggtttttcttttcattagaaaccgcacactgcagttgtggttggataatccaaagattcagctgacatttgaggctactctccaacaattagaagcaccttataacagtgatactgtgcttgtccaccgagttcacagttatttagagcgtcatggtcttatcaacttcggcatctataagaggataaaacccctaccaactaaaaagacaggaaaggtaattattataggctctggggtctcaggcttggcagcagctcgacagttacaaagttttggaatggatgtcacacttttggaagccagggatcgtgtgggtggacgagttgccacatttcgcaaaggaaactatgtagctgatcttggagccatggtggtaacaggtcttggagggaatcctatggctgtggtcagcaaacaagtaaatatggaactggccaagatcaagcaaaaatgcccactttatgaagccaacggacaagctgttcctaaagagaaagatgaaatggtagagcaagagtttaaccggttgctagaagctacatcttaccttagtcatcaactagacttcaatgtcctcaataataagcctgtgtcccttggccaggcattggaagttgtcattcagttacaagagaagcatgtcaaagatgagcagattgaacattggaagaagatagtgaaaactcaggaagaattgaaagaacttcttaataagatggtaaatttgaaagagaaaattaaagaactccatcagcaatacaaagaagcatctgaagtaaagccacccagagatattactgccgagttcttagtgaaaagcaaacacagggatctgaccgccctatgcaaggaatatgatgaattagctgaaacacaaggaaagctagaagaaaaacttcaggagttggaagcgaatcccccaagtgatgtatatctctcatcaagagacagacaaatacttgattggcattttgcaaatcttgaatttgctaatgccacacctctctcaactctctcccttaagcactgggatcaggatgatgactttgagttcactggcagccacctgacagtaaggaatggctactcgtgtgtgcctgtggctttagcagaaggcctagacattaaactgaatacagcagtgcgacaggttcgctacacggcttcaggatgtgaagtgatagctgtgaatacccgctccacgagtcaaacctttatttataaatgcgacgcagttctctgtacccttcccctgggtgtgctgaagcagcagccaccagccgttcagtttgtgccacctctccctgagtggaaaacatctgcagtccaaaggatgggatttggcaaccttaacaaggtggtgttgtgttttgatcgggtgttctgggatccaagtgtcaatttgttcgggcatgttggcagtacgactgccagcaggggtgagctcttcctcttctggaacctctataaagctccaatactgttggcactagtggcaggagaagctgctggtatcatggaaaacataagtgacgatgtgattgttggccgatgcctggccattctcaaagggatttttggtagcagtgcagtacctcagcccaaagaaactgtggtgtctcgttggcgtgctgatccctgggctcggggctcttattcctatgttgctgcaggatcatctggaaatgactatgatttaatggctcagccaatcactcctggcccctcgattccaggtgccccacagccgattccacgactcttctttgcgggagaacatacgatccgtaactacccagccacagtgcatggtgctctgctgagtgggctgcgagaagcgggaagaattgcagaccagtttttgggggccatgtatacgctgcctcgccaggccacaccaggtgttcctgcacagcagtccccaagcatgtga

SEQ ID NO: 254 - protein, 950 aa, Homo sapiens
  Q9NUH3
RRAGSVKRGEARLFGPTERQSERPLRPSAARRPEMLSGKKAAAAAAAAAAAATGTEAGPGTAGGSENGSEVAAQPAGLSGPAEVGPGAVGERTPRKKEPPRASPPGGLAEPPGSAGPQAGPTVVPGSATPMETGIAETPEGRRTSRRKRAKVEYREMDESLANLSEDEYYSEEERNAKAEKEKKLPPPPPQAPPEEENESEPEEPSGQAGGLQDDSSGGYGDGQASGEGGIRCLPLSSKSRQVGIDACKCFWLWYPHFSQKRRCPLLSSLGVEGAAFQSRLPHDRMTSQEAACFPDIISGPQQTQKVFLFIRNRTLQLWLDNPKIQLTFEATLQQLEAPYNSDTVLVHRVHSYLERHGLINFGIYKRIKPLPTKKTGKVIIIGSGVSGLAAARQLQSFGMDVTLLEARDRVGGRVATFRKGNYVADLGAMVVTGLGGNPMAVVSKQVNMELAKIKQKCPLYEANGQAVPKEKDEMVEQEFNRLLEATSYLSHQLDFNVLNNKPVSLGQALEVVIQLQEKHVKDEQIEHWKKIVKTQEELKELLNKMVNLKEKIKELHQQYKEASEVKPPRDITAEFLVKSKHRDLTALCKEYDELAETQGKLEEKLQELEANPPSDVYLSSRDRQILDWHFANLEFANATPLSTLSLKHWDQDDDFEFTGSHLTVRNGYSCVPVALAEGLDIKLNTAVRQVRYTASGCEVIAVNTRSTSQTFIYKCDAVLCTLPLGVLKQQPPAVQFVPPLPEWKTSAVQRMGFGNLNKVVLCFDRVFWDPSVNLFGHVGSTTASRGELFLFWNLYKAPILLALVAGEAAGIMENISDDVIVGRCLAILKGIFGSSAVPQPKETVVSRWRADPWARGSYSYVAAGSSGNDYDLMAQPITPGPSIPGAPQPIPRLFFAGEHTIRNYPATVHGALLSGLREAGRIADQFLGAMYTLPRQATPGVPAQQSPSM

SEQ ID NO: 255 - DNA, 12563 bp, Homo sapiens
  AF076974
cgcgccggggcctggtgctcggtcggcgggtgctgccgctttaagcgggggcgggactgcgcgcggccgagcggttgcgacgagggctcggctgggggtcgccggggtcgcgggccgggcctgcaggagccgggccgccgaggtcggggctggttgaactcatggacctgatacttttctcttgagaagcaaaccagcccaaaagaaaaatggcgtttgttgcaacacagggggccacggtggttgaccagaccactttgatgaaaaagtaccttcagtttgtggcagctctcacagatgtgaatacacctgatgaaacaaagttgaaaatgatgcaagaagttagtgaaaattttgagaatgtcacgtcatctcctcagtattctacattcctagaacatatcatccctcgattccttacatttctccaagatggagaagttcagtttcttcaggagaaaccagcacagcaactgcggaagctcgtacttgaaataattcatagaataccaaccaacgaacatcttcgtcctcacacaaaaaatgttttgtctgtgatgtttcgctttttagagacggaaaatgaagaaaatgttcttatttgtctaagaataattattgagctacacaaacagttcaggccaccgatcacacaagaaattcatcattttctggattttgtgaaacagatttacaaggagcttccaaaagtagtgaaccgctactttgagaaccctcaagtgatccccgagaacacagtgcctcccccagaaatggttggtatgataacaacgattgctgtgaaagtcaacccggagcgtgaggacagtgagactcgaacacattccatcattccgaggggatcactttctctgaaagtgttggcagaattgcccattattgttgttttaatgtatcagctctacaaactgaacatccacaatgttgttgctgagtttgtgcccttgatcatgaacaccattgccattcaggtgtctgcacaagcgaggcaacataagctttacaacaaggagttgtatgctgacttcattgctgctcagattaaaacattgtcatttttagcttacattatcaggatttaccaggagttggtgactaagtattctcagcagatggtgaaaggaatgctccagttactttcaaattgtccagcagagactgcacacctcagaaaggagcttctgattgctgccaaacacatcctcaccacagagctgagaaaccagttcattccttgcatggacaagctgtttgatgaatccatactaattggctcaggatatactgccagagagactctaaggcccctcgcctacagcacgctggccgacctcgtgcaccatgtccgccagcacctgcccctcagcgacctctccctcgccgtccagctcttcgccaagaacatcgacgatgagtccctgcccagcagcatccagaccatgtcctgcaagctcctgctgaacctggtggactgcatccgttccaagagcgagcaggagagtggcaatgggagagacgtcctgatgcggatgctggaggttttcgttctcaaattccacacaattgctcggtaccagctctctgccatttttaagaagtgtaagcctcagtcagaacttggagccgtggaagcagctctgcctggggtgcccactgcccctgcagctcctggccctgctccctccccagcccctgtccctgccccacctccacccccgcccccacccccacctgccacccctgtgaccccggcccccgtgcctcccttcgagaagcaaggagaaaaggacaaggaagacaagcagacattccaagtcacagactgtcgaagtttggtcaaaaccttggtgtgtggtgtcaagacaatcacgtggggcataacatcatgcaaagcacctggtgaagctcagttcattcccaacaagcagttacaacccaaagagacacagatttacatcaaacttgtgaaatatgcaatgcaagctttagatatttatcaggtccagatagcaggaaatggacagacatacatccgtgtggccaactgccagactgtgagaatgaaagaggagaaggaggtattggagcatttcgctggtgtgttcacaatgatgaaccccttaacgttcaaagaaatcttccaaactacggtcccttatatggtggagagaatctcaaaaaattatgctcttcagattgttgccaattccttcttggcaaatcctactacctctgctctgtttgctacgattctggtggaatatctccttgatcgcctgccagaaatgggctccaacgtggagctctccaacctgtacctcaagctgttcaagctggtctttggctctgtctccctctttgcagctgaaaatgaacaaatgctgaagcctcacttgcacaagattgtgaacagctctatggagctcgcgcagactgccaaggaaccctacaactacttcttgctgctacgggcgctgtttcgctctattggtggaggtagccacgatctcttgtatcaggagttcttgcctctccttccaaacctcctgcaagggctgaacatgcttcagagtggcctgcacaagcagcacatgaaggacctctttgtggagctgtgtctcaccgtccctgtgcggctgagctcgcttttgccgtacctgcccatgcttatggatcccttggtgtctgcactcaatgggtctcagacattggtcagccaaggcctcaggacgctggagctgtgtgtggacaacctgcagcccgacttcctctacgaccacatccagccggtgcgcgcagagcttatgcaggctctgtggcgcaccttacgcaaccctgctgacagcatctcccacgtggcctaccgtgtgctcggtaagtttggcggcagtaacaggaagatgctgaaggagtcgcagaagctgcactacgttgtgaccgaggttcagggccccagcatcactgtggagttttccgactgcaaagcttctctccagctccccatggagaaggccattgaaactgctctggactgcctgaaaagcgccaacactgagccctactaccggaggcaggcgtgggaagtgatcaaatgcttcctggtggccatgatgagcctggaggacaacaagcacgcactctaccagctcctggcacaccccaactttacagaaaagaccatccccaatgttatcatctcacatcgctacaaagcccaggacactccagcccggaagacttttgagcaggccctgacaggcgccttcatgtctgctgtcattaaggacctgcggcccagcgccctgccctttgtcgccagcttgatccgccactatacgatggtggcagtcgcccagcagtgtggccctttcttgctgccttgctaccaggtgggcagccagcccagcacagccatgtttcacagtgaagaaaatggctcgaaaggaatggatcctttggttctcattgatgcaattgctatttgtatggcatatgaagaaaaggagctttgcaaaatcggggaggtggccctagctgtgatatttgatgttgcaagtatcatcctgggctccaaggagagggcctgccagctgcccctgttttcttacatcgtggagcgcctgtgtgcatgttgttatgaacaggcgtggtatgcaaagctggggggtgtggtgtctattaagtttctcatggagcggctgcctctcacttgggttctccagaaccagcagacattcctgaaagcacttctctttgtcatgatggacttaactggagaggtttccaatggggcagtcgctatggcaaagaccacgctggagcagcttctgatgcggtgcgcaacgcctttaaaagacgaggagagagccgaagagatcgtggccgcccaggaaaagtctttccaccatgtgacacacgacttggttcgagaagtcacctctccaaactccactgtgaggaagcaggccatgcattcgctgcaggtgttggcccaggtcactgggaagagtgtcacggtgatcatggaaccccacaaagaggtcctgcaggatatggtcccccctaagaagcacctgctccgacaccagcctgccaacgcacagattggcctgatggaggggaacacgttctgtaccacgttgcagcccaggctcttcacaatggaccttaacgtggtggagcataaggtgttctacacagagctgttgaatttgtgtgaggctgaagattcagctttaacaaagctgccctgttataaaagccttccgtcactcgtacctttacgaattgcggcattaaatgcacttgctgcctgcaattaccttcctcagtccagggagaaaatcatcgctgcactcttcaaagccctgaattccaccaatagtgagctccaagaggccggagaagcctgtatgagaaagtttttagaaggtgctaccatagaagtcgatcaaatccacacacatatgcgacctttgctgatgatgctgggagattaccggagcttgacgctgaatgttgtgaatcgcctgacttcggtcacgaggctcttcccaaattccttcaatgataaattttgtgatcagatgatgcaacatctgcgcaagtggatggaagtggtggtgatcacccacaaagggggccagaggagcgacggaaacgaaatgaagatttgctcagcaattataaacctttttcatctgatcccggctgctcctcagacactggtgaagcctttgctagaggttgtcatgaaaacggagcgggcgatgctgatcgaggcggggagtccattccgagagcccctgatcaagttcctgactcgacatccctcgcagacagtggagctgttcatgatggaagccacactgaacgatccccagtggagcagaatgtttatgagttttttaaaacacaaagacgccagacctctgcgggatgtgctggctgccaaccccaacaggttcatcaccctgctgctgccggggggtgcccagacggctgtgcgccccggttcgcccagcaccagcaccatgcgcctggacctccagttccaggccatcaagatcataagcattatagtgaaaaacgatgactcctggctggccagccagcactctctggtgagccagttgcgacgtgtgtgggtgagtgagaacttccaagagaggcaccgcaaggagaacatggcagccaccaactggaaggagcccaagctgctggcctactgcctgctgaactactgcaaaaggaattacggagatatagaattgctgttccagctgctccgagcctttactggtcgttttctctgcaacatgacattcttaaaagagtatatggaggaagagattcccaaaaattacagcatcgctcagaaacgtgccctgttctttcgctttgtagacttcaacgaccccaacttcggagatgaattaaaagctaaagttctgcagcatatcttgaatcctgctttcttgtacagctttgagaagggggaaggagagcagctcttgggacctcccaatccagaaggagataacccagaaagcatcaccagtgtgtttattaccaaggtcctggaccccgagaagcaggcggacatgctggactcgctgcggatctacctgctgcagtacgccacgctgctggtggagcacgccccccaccacatccatgacaacaacaagaaccgcaacagcaagctgcgccgcctcatgaccttcgcctggccctgcctgctctccaaggcctgcgtggacccagcctgcaagtacagcggacacttgctcctggcgcacattatcgccaaattcgccatacacaagaagatcgtcctgcaggtttttcatagtctcctcaaggctcacgcaatggaagctcgagcgatcgtcagacaggcgatggccattctgaccccggcggtgccggccaggatggaggacgggcaccagatgctgacccactggacccggaagatcattgtggaggaggggcacaccgtcccgcagctggtccacattctgcacctgatagtgcaacacttcaaggtgtactacccggtacggcaccacttggtgcagcacatggtgagcgccatgcagaggctgggcttcacgcccagtgtcaccatcgagcagaggcggctggccgtggacctgtctgaagtcgtcatcaagtgggagctgcagaggatcaaggaccagcagccggattcagatatggacccaaattccagtggagaaggagtcaattctgtctcatcctccattaagagaggcctgtccgtggattctgcccaggaagtgaaacgctttaggacggccaccggagccatcagtgcagtctttgggaggagccagtcgctacctggagcagactctctcctcgccaagcccattgacaagcagcacacagacactgtggtgaacttccttatccgcgtggcctgtcaggttaatgacaacaccaacacagcggggtcccctggggaggtgctctctcgccggtgtgtgaaccttctgaagactgcgttgcggccagacatgtggcccaagtccgaactcaagctgcagtggttcgacaagctgctgatgactgtggagcagccaaaccaagtgaactatgggaatatctgcacgggcctagaagtgctgagcttcctgctaactgtcctccagtccccagccatcctcagtagcttcaaacctctgcagcgtggaattgccgcctgcatgacatgtggaaacaccaaggtgttgcgagccgtccacagccttctctcgcgcctgatgagcattttcccaacagagccgagtacttccagtgtggcctccaaatatgaagagctggagtgcctctacgcagccgtcggaaaggtcatctatgaagggctcaccaactacgagaaggccaccaatgccaatccctcccagctcttcgggacccttatgatcctcaagtctgcctgcagcaacaaccccagctacatagacaggctgatctccgtctttatgcgctccctgcagaagatggtccgggagcatttaaaccctcaggcagcgtcaggaagcaccgaagccacctcaggtacaagcgagctggtgatgctgagtctggagctggtgaagacgcgcctggcagtgatgagcatggagatgcggaagaacttcatccaggccatcctgacatccctcatcgaaaaatcaccagatgccaaaatcctccgggctgtggtcaaaatcgtggaagaatgggtcaagaataactccccaatggcagccaatcagacacctacactccgggagaagtccattttgcttgtgaagatgatgacttacatagaaaaacgctttccggaagaccttgaattaaatgcccagtttttagatcttgttaactatgtctacagggatgagaccctctctggcagcgagctgacggcgaaacttgagcctgcctttctctctgggctgcgctgtgcccagccactcatcagggcaaagtttttcgaggtttttgacaactccatgaaacgtcgtgtctacgagcgcttgctctatgtgacctgttcgcagaactgggaagccatggggaaccacttctggatcaagcagtgcattgagctgcttctggccgtgtgtgagaagagcacccccattggcaccagctgccaaggagccatgctcccgtccatcaccaacgtcatcaacctggccgatagccacgaccgtgccgccttcgccatggtcacacatgtcaagcaggagccccgggagcgggagaacagcgagtccaaagaggaggatgtagagatagacatcgaactagctcctggggatcagaccagcacgcccaaaaccaaagaactttcagaaaaggacattggaaaccagctgcacatgctaaccaacaggcacgacaagtttctggacactctccgagaggtgaagactggagcgctgctcagcgctttcgttcagctgtgccacatttccacgacgctggcagagaagacgtgggtccagcttttccccagattgtggaagatcctctctgacagacagcagcatgcactcgcgggtgagataagtccatttctgtgcagcggcagtcaccaggtgcagcgggactgccagcccagcgcgctgaactgctttgtggaagccatgtcccagtgcgtgccgccaatccccatccgaccctgcgtcctgaagtacctggggaagacacacaacctctggttccggtccacgctgatgttggagcaccaggcttttgaaaagggtctgagtcttcagattaagccgaagcaaacaacggagttttatgagcaggagagcatcaccccgccgcagcaggagatactggattcccttgcggagctttactccctgttacaagaggaagatatgtgggctggtctgtggcagaagcggtgcaagtactcggagacagcgactgcgattgcttacgagcagcacgggttctttgagcaggcacaagaatcctatgaaaaggcaatggataaagccaaaaaagaacatgagaggagtaacgcctcccctgctattttccctgaataccagctctgggaagaccactggattcgatgctccaaggaattgaaccagtgggaagccctgacggagtacggtcagtccaaaggccacatcaacccctacctcgtcctggagtgcgcctggcgggtgtccaactggactgccatgaaggaggcgctggtgcaggtggaagtgagctgtccgaaggagatggcctggaaggtgaacatgtaccgcggatacctggccatctgccaccccgaggagcagcagctcagcttcatcgagcgcctggtggagatggccagcagcctggccatccgcgagtggcggcggctgccccacgtagtgtcccacgtgcacacgcctctcctacaggcagcccagcaaatcatcgaactccaggaagctgcacaaatcaacgcaggcttacagccaaccaacctgggaaggaacaacagcctgcacgacatgaagacggtggtgaagacctggaggaaccgactgcccatcgtgtctgacgacttgtcccactggagcagcatcttcatgtggaggcagcatcattaccaggcgattgtaactgcctatgagaatagctctcagcatgatcccagttcaaataacgctatgcttggggttcatgcatcagcttcagcgatcatccagtatggaaaaatcgcccggaaacaaggactggtcaatgtagctctggatatattaagtcggattcatactattccaactgttcctatcgtggattgcttccagaagattcgacagcaagttaaatgctacctccagctggcaggcgtcatgggcaaaaacgagtgcatgcagggccttgaagttattgaatctacaaatttaaaatacttcacaaaagagatgacagccgaattttatgcactgaagggaatgttcttggctcagatcaacaagtccgaggaggcaaacaaagccttctctgcagctgtgcagatgcacgatgtgctggtgaaagcctgggccatgtggggcgactacctggagaacatctttgtgaaggagcggcagctgcacctgggcgtgtctgccatcacctgctacctgcacgcctgccggcatcagaacgagagcaaatcgaggaaatacttagccaaggtgctgtggcttttgagttttgatgatgacaaaaacactttggcagatgccgtcgacaagtactgcattggtgtgccacccatccagtggctggcctggatcccacagctgctcacctgcctggttggctcggagggaaagctgctcttgaacctcattagccaggttggacgcgtgtatccccaagcggtctactttcccatccggaccctgtacctgaccctgaaaatagaacagcgggaacgctacaagagcgatccagggcccataagagcaacagcacccatgtggcgctgcagccgaatcatgcacatgcagcgagagctccaccccacccttctgtcttccctggaaggcatcgtcgatcagatggtctggttcagagaaaattggcatgaagaggttctcaggcagctccaacagggcctggcgaaatgttactccgtggcgtttgagaaaagtggagcggtgtccgatgctaaaatcaccccccacactctcaattttgtgaagaagttggtgagcacgtttggggtgggcctggagaatgtgtccaacgtctcgaccatgttctccagcgcagcctctgagtctctggcccggcgggcgcaggccactgcacaagaccctgtctttcagaagctgaaaggccagttcacgacggattttgacttcagcgttccaggatccatgaagcttcataatcttatttctaagttgaaaaagtggatcaaaatcttggaggccaagaccaagcaactccccaaattcttcctcatagaggaaaagtgccggttcttgagcaatttctcggcacagacagctgaagtggaaattcctggggagtttctgatgccaaagccaacgcattattacatcaagattgcacggttcatgccccgggtagagattgtgcagaagcacaacaccgcagcccggcggctgtacatccggggacacaatggcaagatctacccatacctcgtcatgaacgacgcctgcctcacagagtcacggcgagaggagcgtgtgttgcagctgctgcgtctgctgaacccctgtttggagaagagaaaggagaccaccaagaggcacttgtttttcacagtgccccgggttgtggcagtttccccacagatgcgcctcgtggaggacaacccctcttcactttcccttgtggagatctacaagcagcgctgcgccaagaagggcatcgagcatgacaaccccatctcccgttactatgaccggctggctacggtgcaggcgcggggaacccaagccagccaccaggtcctccgcgacatcctcaaggaggttcagagtaacatggtgccgcgcagcatgctcaaggagtgggcgctgcacaccttccccaatgccacggactactggacgttccggaagatgttcaccatccagctggctctgataggcttcgcggaattcgtcctgcatttaaatagactcaaccccgagatgttacagatcgctcaggacactggcaaactgaatgttgcctactttcgatttgacataaacgacgcgactggagacctggatgccaaccgtcctgtcccatttcgactcacgcccaacatttctgagtttctgaccaccatcggggtctccggcccgttgacagcgtccatgattgcggtcgcccggtgcttcgcccagccaaactttaaggtggatggcattctgaaaacggttctccgggacgagatcattgcttggcacaaaaaaacacaagaggacacgtcctctcctctctcggccgccgggcagccagagaacatggacagccagcaactggtgtccctggttcagaaagccgtcaccgccatcatgacccgcctgcacaacctcgcccagttcgaaggcggggaaagcaaggtgaacaccctggtggccgcggcaaacagcctggacaatctgtgccgcatggaccccgcctggcacccctggctgtgactgtggccgccacggcacgcgggaatgtgaagggcgctccgggctctgagcccgcagcttttacgacttctccctgcgtcgttccttatattcacagaagccccatagtttcactgggttgcggttattttcctggtagtttgcgtgtaagaaagggagaatatagttttagaggaagctgaactatgacgatgctgggcgaacggtttgggaaatggcagagctgaaacttattccaagctttcaaaataatcttttaagaagccaggattctccggtctggaatttctgagtgagtcctttttttatggtgtcctccctctgtgaatgtacaggcggaactgtacgaacagctcccttccatccatttttaactctttcggaaataacacctcacagcagcttcgtgcttttgtacagacctttgtaacaagtgtacagaaaactcattttgtttgagaaacaggagttgatgaacccatcatgctggtttttctctgagcacaaagttttaggctgtacacagccagccttgggaatctcgttgagcgttcggcgtggatccacggggccaggccaccctgcgggaggccacacgcatccacttcggattcagtgggtgaagacagaactctgagagtctgcaggcggctcctgtgctttttatttctggctcttcggatgtcttctagacatttactatcactgcacctgaagaaaaaatcacttttaccttcctaatttaaaaagacaaaacagaaatgtacgttccttcgctagctttagtctttctgttcccatttttataaatctgagcattgataatgttctatctaaatttgtacagtgtgattttttttt

SEQ ID NO: 256 - protein, 3830 aa, Homo sapiens
  Q9Y6H4
MAFVATQGATVVDQTTLMKKYLQFVAALTDVNTPDETKLKMMQEVSENFENVTSSPQYSTFLEHIIPRFLTFLQDGEVQFLQEKPAQQLRKLVLEIIHRIPTNEHLRPHTKNVLSVMFRFLETENEENVLICLRIIIELHKQFRPPITQEIHHFLDFVKQIYKELPKVVNRYFENPQVIPENTVPPPEMVGMITTIAVKVNPEREDSETRTHSIIPRGSLSLKVLAELPIIVVLMYQLYKLNIHNVVAEFVPLIMNTIAIQVSAQARQHKLYNKELYADFIAAQIKTLSFLAYIIRIYQELVTKYSQQMVKGMLQLLSNCPAETAHLRKELLIAAKHILTTELRNQFIPCMDKLFDESILIGSGYTARETLRPLAYSTLADLVHHVRQHLPLSDLSLAVQLFAKNIDDESLPSSIQTMSCKLLLNLVDCIRSKSEQESGNGRDVLMRMLEVFVLKFHTIARYQLSAIFKKCKPQSELGAVEAALPGVPTAPAAPGPAPSPAPVPAPPPPPPPPPPATPVTPAPVPPFEKQGEKDKEDKQTFQVTDCRSLVKTLVCGVKTITWGITSCKAPGEAQFIPNKQLQPKETQIYIKLVKYAMQALDIYQVQIAGNGQTYIRVANCQTVRMKEEKEVLEHFAGVFTMMNPLTFKEIFQTTVPYMVERISKNYALQIVANSFLANPTTSALFATILVEYLLDRLPEMGSNVELSNLYLKLFKLVFGSVSLFAAENEQMLKPHLHKIVNSSMELAQTAKEPYNYFLLLRALFRSIGGGSHDLLYQEFLPLLPNLLQGLNMLQSGLHKQHMKDLFVELCLTVPVRLSSLLPYLPMLMDPLVSALNGSQTLVSQGLRTLELCVDNLQPDFLYDHIQPVRAELMQALWRTLRNPADSISHVAYRVLGKFGGSNRKMLKESQKLHYVVTEVQGPSITVEFSDCKASLQLPMEKAIETALDCLKSANTEPYYRRQAWEVIKCFLVAMMSLEDNKHALYQLLAHPNFTEKTIPNVIISHRYKAQDTPARKTFEQALTGAFMSAVIKDLRPSALPFVASLIRHYTMVAVAQQCGPFLLPCYQVGSQPSTAMFHSEENGSKGMDPLVLIDAIAICMAYEEKELCKIGEVALAVIFDVASIILGSKERACQLPLFSYIVERLCACCYEQAWYAKLGGVVSIKFLMERLPLTWVLQNQQTFLKALLFVMMDLTGEVSNGAVAMAKTTLEQLLMRCATPLKDEERAEEIVAAQEKSFHHVTHDLVREVTSPNSTVRKQAMHSLQVLAQVTGKSVTVIMEPHKEVLQDMVPPKKHLLRHQPANAQIGLMEGNTFCTTLQPRLFTMDLNVVEHKVFYTELLNLCEAEDSALTKLPCYKSLPSLVPLRIAALNALAACNYLPQSREKIIAALFKALNSTNSELQEAGEACMRKFLEGATIEVDQIHTHMRPLLMMLGDYRSLTLNVVNRLTSVTRLFPNSFNDKFCDQMMQHLRKWMEVVVITHKGGQRSDGNEMKICSAIINLFHLIPAAPQTLVKPLLEVVMKTERAMLIEAGSPFREPLIKFLTRHPSQTVELFMMEATLNDPQWSRMFMSFLKHKDARPLRDVLAANPNRFITLLLPGGAQTAVRPGSPSTSTMRLDLQFQAIKIISIIVKNDDSWLASQHSLVSQLRRVWVSENFQERHRKENMAATNWKEPKLLAYCLLNYCKRNYGDIELLFQLLRAFTGRFLCNMTFLKEYMEEEIPKNYSIAQKRALFFRFVDFNDPNFGDELKAKVLQHILNPAFLYSFEKGEGEQLLGPPNPEGDNPESITSVFITKVLDPEKQADMLDSLRIYLLQYATLLVEHAPHHIHDNNKNRNSKLRRLMTFAWPCLLSKACVDPACKYSGHLLLAHIIAKFAIHKKIVLQVFHSLLKAHAMEARAIVRQAMAILTPAVPARMEDGHQMLTHWTRKIIVEEGHTVPQLVHILHLIVQHFKVYYPVRHHLVQHMVSAMQRLGFTPSVTIEQRRLAVDLSEVVIKWELQRIKDQQPDSDMDPNSSGEGVNSVSSSIKRGLSVDSAQEVKRFRTATGAISAVFGRSQSLPGADSLLAKPIDKQHTDTVVNFLIRVACQVNDNTNTAGSPGEVLSRRCVNLLKTALRPDMWPKSELKLQWFDKLLMTVEQPNQVNYGNICTGLEVLSFLLTVLQSPAILSSFKPLQRGIAACMTCGNTKVLRAVHSLLSRLMSIFPTEPSTSSVASKYEELECLYAAVGKVIYEGLTNYEKATNANPSQLFGTLMILKSACSNNPSYIDRLISVFMRSLQKMVREHLNPQAASGSTEATSGTSELVMLSLELVKTRLAVMSMEMRKNFIQAILTSLIEKSPDAKILRAVVKIVEEWVKNNSPMAANQTPTLREKSILLVKMMTYIEKRFPEDLELNAQFLDLVNYVYRDETLSGSELTAKLEPAFLSGLRCAQPLIRAKFFEVFDNSMKRRVYERLLYVTCSQNWEAMGNHFWIKQCIELLLAVCEKSTPIGTSCQGAMLPSITNVINLADSHDRAAFAMVTHVKQEPRERENSESKEEDVEIDIELAPGDQTSTPKTKELSEKDIGNQLHMLTNRHDKFLDTLREVKTGALLSAFVQLCHISTTLAEKTWVQLFPRLWKILSDRQQHALAGEISPFLCSGSHQVQRDCQPSALNCFVEAMSQCVPPIPIRPCVLKYLGKTHNLWFRSTLMLEHQAFEKGLSLQIKPKQTTEFYEQESITPPQQEILDSLAELYSLLQEEDMWAGLWQKRCKYSETATAIAYEQHGFFEQAQESYEKAMDKAKKEHERSNASPAIFPEYQLWEDHWIRCSKELNQWEALTEYGQSKGHINPYLVLECAWRVSNWTAMKEALVQVEVSCPKEMAWKVNMYRGYLAICHPEEQQLSFIERLVEMASSLAIREWRRLPHVVSHVHTPLLQAAQQIIELQEAAQINAGLQPTNLGRNNSLHDMKTVVKTWRNRLPIVSDDLSHWSSIFMWRQHHYQAIVTAYENSSQHDPSSNNAMLGVHASASAIIQYGKIARKQGLVNVALDILSRIHTIPTVPIVDCFQKIRQQVKCYLQLAGVMGKNECMQGLEVIESTNLKYFTKEMTAEFYALKGMFLAQINKSEEANKAFSAAVQMHDVLVKAWAMWGDYLENIFVKERQLHLGVSAITCYLHACRHQNESKSRKYLAKVLWLLSFDDDKNTLADAVDKYCIGVPPIQWLAWIPQLLTCLVGSEGKLLLNLISQVGRVYPQAVYFPIRTLYLTLKIEQRERYKSDPGPIRATAPMWRCSRIMHMQRELHPTLLSSLEGIVDQMVWFRENWHEEVLRQLQQGLAKCYSVAFEKSGAVSDAKITPHTLNFVKKLVSTFGVGLENVSNVSTMFSSAASESLARRAQATAQDPVFQKLKGQFTTDFDFSVPGSMKLHNLISKLKKWIKILEAKTKQLPKFFLIEEKCRFLSNFSAQTAEVEIPGEFLMPKPTHYYIKIARFMPRVEIVQKHNTAARRLYIRGHNGKIYPYLVMNDACLTESRREERVLQLLRLLNPCLEKRKETTKRHLFFTVPRVVAVSPQMRLVEDNPSSLSLVEIYKQRCAKKGIEHDNPISRYYDRLATVQARGTQASHQVLRDILKEVQSNMVPRSMLKEWALHTFPNATDYWTFRKMFTIQLALIGFAEFVLHLNRLNPEMLQIAQDTGKLNVAYFRFDINDATGDLDANRPVPFRLTPNISEFLTTIGVSGPLTASMIAVARCFAQPNFKVDGILKTVLRDEIIAWHKKTQEDTSSPLSAAGQPENMDSQQLVSLVQKAVTAIMTRLHNLAQFEGGESKVNTLVAAANSLDNLCRMDPAWHPWL

SEQ ID NO: 257 - DNA, 2421 bp, Homo sapiens
  AC004472
atggcttctggagccgattcaaaaggtgatgacctatcaacagccattctcaaacagaagaaccgtcccaatcggttaattgttgatgaagccatcaatgaggacaacagtgtggtgtccttgtcccagcccaagatggatgaattgcagttgttccgaggtgacacagtgttgctgaaaggaaagaagagacgagaagctgtttgcatcgtcctttctgatgatacttgttctgatgagaagattcggatgaatagagttgttcggaataaccttcgtgtacgcctaggggatgtcatcagcatccagccatgccctgatgtgaagtacggcaaacgtatccatgtgctgcccattgatgacacagtggaaggcattactggtaatctcttcgaggtataccttaagccgtacttcctggaagcgtatcgacccatccggaaaggagacatttttcttgtccgtggtgggatgcgtgctgtggagttcaaagtggtggaaacagatcctagcccttattgcattgttgctccagacacagtgatccactgcgaaggggagcctatcaaacgagaggatgaggaagagtccttgaatgaagtagggtatgatgacattggtggctgcaggaagcagctagctcagataaaggagatggtggaactgcccctgagacatcctgccctctttaaggcaattggtgtgaagcctcctagaggaatcctgctttacggacctcctggaacaggaaagaccctgattgctcgagctgtagcaaatgagactggagccttcttcttcttgatcaatggtcctgagatcatgagcaaattggctggtgagtctgagagcaaccttcgtaaagcctttgaggaggctgagaagaatgctcctgccatcatcttcattgatgagctagatgccatcgctcccaaaagagagaaaactcatggcgaggtggagcggcgcattgtatcacagttgttgaccctcatggatggcctaaagcagagggcacatgtgattgttatggcagcaaccaacagacccaacagcattgacccagctctacggcgatttggtcgctttgacagggaggtagatattggaattcctgatgctacaggacgcttagagattcttcagatccataccaagaacatgaagctggcagatgatgtggacctggaacaggtagccaatgagactcacgggcatgtgggtgctgacttagcagccctgtgctcagaggctgctctgcaagccatccgcaagaagatggatctcattgacctagaggatgagaccattgatgccgaggtcatgaactctctagcagttactatggatgacttccggtgggccttgagccagagtaacccatcagcactgcgggaaaccgtggtagaggtgccacaggtaacctgggaagacatcgggggcctagaggatgtcaaacgtgagctacaggagctggtccagtatcctgtggagcacccagacaaattcctgaagtttggcatgacaccttccaagggagttctgttctatggacctcctggctgtgggaaaactttgttggccaaagccattgctaatgaatgccaggccaacttcatctccatcaagggtcctgagctgctcaccatgtggtttggggagtctgaggccaatgtcagagaaatctttgacaaggcccgccaagctgccccctgtgtgctattctttgatgagctggattcgattgccaaggctcgtggaggtaacattggagatggtggtggggctgctgaccgagtcatcaaccagatcctgacagaaatggatggcatgtccacaaaaaaaaatgtgttcatcattggcgctaccaaccggcctgacatcattgatcctgccatcctcagacctggccgtcttgatcagctcatctacatcccacttcctgatgagaagtcccgtgttgccatcctcaaggctaacctgcgcaagtccccagttgccaaggatgtggacttggagttcctggctaaaatgactaatggcttctctggagctgacctgacagagatttgccagcgtgcttgcaagctggccatccgtgaatccatcgagagtgagattaggcgagaacgagagaggcagacaaacccatcagccatggaggtagaagaggatgatccagtgcctgagatccgtcgagatcactttgaagaagccatgcgctttgcgcgccgttctgtcagtgacaatgacattcggaagtatgagatgtttgcccagacccttcagcagagtcggggctttggcagcttcagattcccttcagggaaccagggtggagctggccccagtcagggcagtggaggcggcacaggtggcagtgtatacacagaagacaatgatgatgacctgtatggctaa

SEQ ID NO: 258 - protein, 806 aa, Homo sapiens
  P55072
MASGADSKGDDLSTAILKQKNRPNRLIVDEAINEDNSVVSLSQPKMDELQLFRGDTVLLKGKKRREAVCIVLSDDTCSDEKIRMNRVVRNNLRVRLGDVISIQPCPDVKYGKRIHVLPIDDTVEGITGNLFEVYLKPYFLEAYRPIRKGDIFLVRGGMRAVEFKVVETDPSPYCIVAPDTVIHCEGEPIKREDEEESLNEVGYDDIGGCRKQLAQIKEMVELPLRHPALFKAIGVKPPRGILLYGPPGTGKTLIARAVANETGAFFFLINGPEIMSKLAGESESNLRKAFEEAEKNAPAIIFIDELDAIAPKREKTHGEVERRIVSQLLTLMDGLKQRAHVIVMAATNRPNSIDPALRRFGRFDREVDIGIPDATGRLEILQIHTKNMKLADDVDLEQVANETHGHVGADLAALCSEAALQAIRKKMDLIDLEDETIDAEVMNSLAVTMDDFRWALSQSNPSALRETVVEVPQVTWEDIGGLEDVKRELQELVQYPVEHPDKFLKFGMTPSKGVLFYGPPGCGKTLLAKAIANECQANFISIKGPELLTMWFGESEANVREIFDKARQAAPCVLFFDELDSIAKARGGNIGDGGGAADRVINQILTEMDGMSTKKNVFIIGATNRPDIIDPAILRPGRLDQLIYIPLPDEKSRVAILKANLRKSPVAKDVDLEFLAKMTNGFSGADLTEICQRACKLAIRESIESEIRRERERQTNPSAMEVEEDDPVPEIRRDHFEEAMRFARRSVSDNDIRKYEMFAQTLQQSRGFGSFRFPSGNQGGAGPSQGSGGGTGGSVYTEDNDDDLYG

SEQ ID NO: 259 - DNA, 7463 bp, Homo sapiens
  AB014597
gcgaggaagaagaggacgacgacgacgaggaagaggaggtttctgaggtggagtctttcattttggatcaggatgatttggaaaatccaatgctggaaacagcttccaagttgctcttatcaggtactgctgatggtgcagacctcaggacagtagatccagaaacacaggctagactggaagctttactagaagctgcaggaataggaaaattgtccacggctgatggtaaagcctttgcagatcctgaagtacttcggaggttgacatcgtctgttagttgtgcgttggatgaagctgctgctgcacttacccgtatgagagctgaaagcacagcaaatgcagggcagtcggacaaccgcagtttggcagaagcctgttcagaaggagatgtaaatgctgtgcgaaagttactcattgaagggcgaagtgtaaatgaacacacagaggaaggggagagcctcctttgtttagcttgttctgctggatactatgagcttgcacaggttttgttggcaatgcatgcaaatgtggaagataggggaatcaaaggtgacattacatctttaatggctgctgctaatggaggacatgtcaaaattgtgaagttgctgctagctcataaagcagatgttaatgcacagtcttcaacaggcaatacagcacttacatatgcttgtgctggaggctatgtagatgttgtaaaggtgctcttggaatccggtgctagtattgaggaccataatgaaaatggtcatacccctcttatggaagctggaagtgctggacatgtggaagtagccagattgctgctagaaaatggggctggcattaatacgcattctaatgaatttaaagagagtgcccttaccttagcttgttacaaaggacacttagagatggtgcgatttcttttggaagcaggcgcggatcaagagcataaaacagatgaaatgcacactgctctgatggaggcttgcatggatggccatgttgaagtagctaggttacttcttgacagcggtgcccaagtgaacatgcctgctgattcatttgagtcaccattaactttggctgcatgtggtgggcatgtggaacttgcggctttacttattgaaagaggagctagcctggaagaggtcaatgatgaaggttatacaccattgatggaagcagctcgagaaggacatgaagaaatggtggcattacttcttggtcaaggagcaaatatcaatgcacagacagaagaaactcaagaaactgccttgactctggcttgctgtggaggctttctggaagtggcagactttctaattaaggcaggagccgatatagaactagggtgttctacccctttaatggaagctgctcaagagggtcatttggagttagttaaatacttattagctgcaggagctaacgttcatgcaacaacagcaacaggggatacagcactaacatatgcctgtgaaaatggtcatactgatgtagcagatgtcttacttcaggcaggcgcagatctggaacatgaatctgaaggtggaagaactcctttaatgaaagctgcaagagctggtcatgtttgtactgttcagttcttaattagtaaaggagcgaatgtgaatagaaccacagctaataatgaccatactgtactgtccctggcttgtgcagggggtcatctggcagtggtggaactacttttggctcatggggcagatcctactcaccgtttgaaagatggctcaactatgttgatagaagcagcaaaaggtggccatacaagtgttgtttgctatctcttggattatcctaataacttgctttcagcccctccaccagatgtcactcagttaactcccccatcccacgatttaaatagggctcctcgtgtaccagttcaagcactgcccatggttgttccacctcaggagcctgacaaaccacctgccaatgttgccaccactcttcccatcaggaataaagctgcttctaaacaaaagtccagcagccatttgccagcaaacagccaggatgtacagggttacatcaccaatcagtctccagagagcattgtagaagaggctcagggaaagttaacagaactggaacagaggataaaagaagccatagaaaagaatgcacagctgcagtccttggaactggctcatgctgaccaacttaccaaggagaagatcgaggagctcaacaaaacaagggaggaacaaattcagaagaaacaaaagattttggaggaactacagaaagtagaacgagagttacaactgaaaactcagcagcagctaaaaaagcagtatctagaggttaaagctcaaagaattcaacttcagcaacagcagcaacagtcttgccaacacctgggattactaactcctgttggagttggagagcagctttctgagggagactatgcacggttacagcaagtggatcctgttttacttaaagatgaaccccagcagactgctgctcagatgggttttgcgccaatccagcctctggcgatgcctcaagctttgcctctggcggcaggtcccttgcctccagggtccatcgcaaatcttacagaactgcaaggagtgatagttggacagccagtactgggccaagcacagttggcagggctggggcaaggaattctgacagaaacacaacaagggttaatggtagccagccctgctcagaccctcaatgacacgctggatgacatcatggcagtcagtggaagagcatctgcaatgtcaaacactcctacccacagtattgctgcatccatttcccaacctcagactccaactccaagtcctatcatctctccttcagccatgcttcctatctaccctgccattgatattgatgcacagactgagagtaatcatgacacggcgctaacacttgcctgtgctggtggccacgaggaactggtacaaacactgctagagagaggagctagtatagagcaccgagacaagaaaggttttactccactcatcttggctgccacagctggtcatgttggtgttgtggaaatattgctggacaatggtgcagacattgaagcccagtctgaaagaaccaaggacacaccactctccttggcttgttctgggggaagacaggaggtggtggagctattgttagctcgaggggcaaataaagagcacaggaatgtttctgattacacacctctaagtctggctgcttctggtggctatgtgaacatcatcaaaatattactaaatgcaggagctgagattaactctagaactggtagcaaattgggcatctctcctctgatgttagcagctatgaatgggcatacagctgctgttaagctcctgttagacatgggctctgacataaatgctcagatagaaaccaatcggaacactgcccttactttagcctgcttccaaggaagaactgaagtggttagtcttctgcttgatagaaaagcaaatgttgaacacagagctaagactggtctcacaccactaatggaagctgcctctggtggatatgcggaggtgggccgagttcttttggataaaggtgctgatgttaatgcccctccagttccctcctcaagagatacagctttaaccatagcagcagataaagggcattacaaattctgtgagcttcttattggcaggggagctcatattgatgtacgtaacaagaaggggaacactccattgtggctagcagcaaatggtggacacctcgatgtggttcagttactggtgcaagcaggtgcagatgtggatgcagcagataaccgcaagataactcctcttatggcagcatttagaaagggtcatgtgaaggtggtgcgctacttagtcaaagaagtcaatcagtttccatcagattctgaatgtatgagatacatagcaaccatcactgataaggagatgctgaagaagtgtcatctttgtatggagtcaatagtacaagccaaagatagacaggctgctgaagcaaacaaaaacgccagcattttgttagaggagttagacttggaaaagttaagggaagaaagtcggaggctggctttggctgcgaaaagagaaaaaagaaaagagaagagaaggaagaaaaaggaagaacaaagaaggaaactagaagaaattgaagccaaaaataaagagaactttgaactccaagctgctcaagaaaaagaaaagcttaaagttgaagatgagcctgaagtcttgacagaacctccaagtgccacaaccactactaccataggtatatctgcaacctggacaactttggcaggttctcatggtaaaagaaataataccataactacaaccagttcaaagaggaaaaacaggaaaaataaaattactccagaaaacgttcaaattatatttgatgatccactaccaatttcatacagtcagccagagaaggtgaatggagagtccaagagcagcagtaccagcgagagtggggacagtgataacatgaggatttccagctgcagcgatgaaagtagtaacagcaacagcagtcgtaagagtgacaatcattcaccagctgtggtcactaccactgtgagcagcaaaaagcagccatcagttcttgttacatttccaaaggaagagagaaaatctgtttctggcaaggcttcaataaaattgtcagaaactatcagtgaagggaccagtaattctctatctacttgtacaaaatctggtccatctcccctttcttctccaaatgggaagttaacagtagcaagtcctaagcgtgggcaaaagagggaagaaggatggaaagaagttgtaagaaggtcaaagaaagtatctgttccatcaactgtgatatccagagtgattggaagaggaggctgtaatatcaatgctattcgggagtttactggtgcacacatagatattgataaacagaaagacaagactggagaccggataatcactataaggggtggcactgaatcaacaagacaagcaactcaattgattaatgctttgatcaaggatccagacaaagaaattgatgaacttattccaaagaatcgtttgaaaagctcctcagcaaattccaaaatagggtcatcagcacctaccaccactgctgctaacacttccttaatgggaattaaaatgacaactgtagctctgtcatcaacatctcaaactgccacagcactcactgtgcctgcaatttcttctgcatccactcacaaaaccattaagaacccagtgaataatgtgaggcctggttttccagtttctcttccattagcatatcctcctccacagtttgcacatgctttgcttgctgctcagactttccagcagatccgtccaccaaggttgcccatgacccactttggaggtacttttccaccagctcaatccacttggggtccgtttcctgtcaggcctttgagccctgccagagctactaactcgcctaagcctcacatggtgcctcgccatagcaatcagaatagcagtggttctcaggtgaattcagcaggttctttaacttcaagcccaacaactacaaccagttcatcagcttcaacggtgcctggtacatctacaaatggcagtccaagttcaccttctgtccgaaggcagctttttgtcacagttgtgaagacatccaatgccaccacaacaacagtcacaaccacggcaagcaacaacaacactgcacccacaaatgccacatatcctatgcctactgccaaagaacactatccagtatcatccccatcttccccatcaccaccagcccagccaggaggggtttctagaaacagccctttggattgtggatcagcatctccaaataaagtggcatcttcctccgaacaggaagcaggtagtccaccagtagtagaaacaacaaacactagacctccaaacagcagcagttcttctgggagttcatcagctcattctaatcagcaacaacctccgggatctgtttctcaggaaccaagaccacctcttcagcagtctcaggttcctcccccggaagttagaatgactgttcctcctttagcaacaagttctgctccagtggcggtgccttctactgccccagtgacttaccctatgcctcagacaccaatgggatgcccccagcctactcctaaaatggaaacccctgctattagaccaccccctcatggcacaactgcccctcacaagaattcagcttcagtgcaaaattcatctgttgcagtcctcagtgtcaatcacattaaaagacctcacagtgttccctcttctgtccagctaccttcgaccttaagtacacaaagtgcttgtcagaattcagtacatccagcaaataagcctattgctcccaatttcagtgcccccttaccatttgggccctttagcacattgtttgaaaacagccctacttctgctcatgccttctggggaggatctgttgtttcatctcagtcaacaccagaatctatgctatcaggaaaatcctcatatttgccaaattcagatcctttacatcagtctgatacttccaaagctccaggttttagaccaccattacagagacctgctccaagtccctcaggtattgtcaatatggactcgccatatggttctgtaacaccttcttcaacacatttgggaaactttgcttcaaacatttcaggaggtcagatgtacggacctggggcaccccttggaggagcacccgcagctgctaactttaacagacaacatttttccccgcttagtttgttgactccgtgttcatcagcatcaaatgattcttctgcacagtcagtatcctcgggagttcgtgcaccatctcctgccccatcatcagtaccgttagggtcagaaaagcccagcaatgtgtctcaggacaggaaagttccagtccctattgggactgaacgttctgcacgtatcaggcaaactggaacgtcagctccatctgttattgggagcaatttgtctacatcagtaggacatagtggcatctggtcctttgaagggattggtggcaatcaagacaaagtagactggtgtaaccctgggatgggaaatcctatgatccacagaccgatgtctgacccaggagtattttcacaacatcaagcaatggagcgagatagtacaggaattgtaactccttctggtacattccatcagcatgttcctgcaggctacatggactttcctaaagttgggggtatgcctttttctgtgtatgggaatgcaatgattcctccagtagcacctatccctgatggtgctggaggacccatatttaatggccctcatgctgcagacccttcttggaactcactgataaagatggtttccagctccacggaaaataatggccctcaaacggtgtggactggaccctgggcacctcacatgaacagtgtgcatatgaaccagcttggctga

SEQ ID NO: 260 - protein, 2486 aa, Homo sapiens
  O75179; BAA31672
EEEEDDDDEEEEVSEVESFILDQDDLENPMLETASKLLLSGTADGADLRTVDPETQARLEALLEAAGIGKLSTADGKAFADPEVLRRLTSSVSCALDEAAAALTRMRAESTANAGQSDNRSLAEACSEGDVNAVRKLLIEGRSVNEHTEEGESLLCLACSAGYYELAQVLLAMHANVEDRGIKGDITSLMAAANGGHVKIVKLLLAHKADVNAQSSTGNTALTYACAGGYVDVVKVLLESGASIEDHNENGHTPLMEAGSAGHVEVARLLLENGAGINTHSNEFKESALTLACYKGHLEMVRFLLEAGADQEHKTDEMHTALMEACMDGHVEVARLLLDSGAQVNMPADSFESPLTLAACGGHVELAALLIERGASLEEVNDEGYTPLMEAAREGHEEMVALLLGQGANINAQTEETQETALTLACCGGFLEVADFLIKAGADIELGCSTPLMEAAQEGHLELVKYLLAAGANVHATTATGDTALTYACENGHTDVADVLLQAGADLEHESEGGRTPLMKAARAGHVCTVQFLISKGANVNRTTANNDHTVLSLACAGGHLAVVELLLAHGADPTHRLKDGSTMLIEAAKGGHTSVVCYLLDYPNNLLSAPPPDVTQLTPPSHDLNRAPRVPVQALPMVVPPQEPDKPPANVATTLPIRNKAASKQKSSSHLPANSQDVQGYITNQSPESIVEEAQGKLTELEQRIKEAIEKNAQLQSLELAHADQLTKEKIEELNKTREEQIQKKQKILEELQKVERELQLKTQQQLKKQYLEVKAQRIQLQQQQQQSCQHLGLLTPVGVGEQLSEGDYARLQQVDPVLLKDEPQQTAAQMGFAPIQPLAMPQALPLAAGPLPPGSIANLTELQGVIVGQPVLGQAQLAGLGQGILTETQQGLMVASPAQTLNDTLDDIMAVSGRASAMSNTPTHSIAASISQPQTPTPSPIISPSAMLPIYPAIDIDAQTESNHDTALTLACAGGHEELVQTLLERGASIEHRDKKGFTPLILAATAGHVGVVEILLDNGADIEAQSERTKDTPLSLACSGGRQEVVELLLARGANKEHRNVSDYTPLSLAASGGYVNIIKILLNAGAEINSRTGSKLGISPLMLAAMNGHTAAVKLLLDMGSDINAQIETNRNTALTLACFQGRTEVVSLLLDRKANVEHRAKTGLTPLMEAASGGYAEVGRVLLDKGADVNAPPVPSSRDTALTIAADKGHYKFCELLIGRGAHIDVRNKKGNTPLWLAANGGHLDVVQLLVQAGADVDAADNRKITPLMAAFRKGHVKVVRYLVKEVNQFPSDSECMRYIATITDKEMLKKCHLCMESIVQAKDRQAAEANKNASILLEELDLEKLREESRRLALAAKREKRKEKRRKKKEEQRRKLEEIEAKNKENFELQAAQEKEKLKVEDEPEVLTEPPSATTTTTIGISATWTTLAGSHGKRNNTITTTSSKRKNRKNKITPENVQIIFDDPLPISYSQPEKVNGESKSSSTSESGDSDNMRISSCSDESSNSNSSRKSDNHSPAVVTTTVSSKKQPSVLVTFPKEERKSVSGKASIKLSETISEGTSNSLSTCTKSGPSPLSSPNGKLTVASPKRGQKREEGWKEVVRRSKKVSVPSTVISRVIGRGGCNINAIREFTGAHIDIDKQKDKTGDRIITIRGGTESTRQATQLINALIKDPDKEIDELIPKNRLKSSSANSKIGSSAPTTTAANTSLMGIKMTTVALSSTSQTATALTVPAISSASTHKTIKNPVNNVRPGFPVSLPLAYPPPQFAHALLAAQTFQQIRPPRLPMTHFGGTFPPAQSTWGPFPVRPLSPARATNSPKPHMVPRHSNQNSSGSQVNSAGSLTSSPTTTTSSSASTVPGTSTNGSPSSPSVRRQLFVTVVKTSNATTTTVTTTASNNNTAPTNATYPMPTAKEHYPVSSPSSPSPPAQPGGVSRNSPLDCGSASPNKVASSSEQEAGSPPVVETTNTRPPNSSSSSGSSSAHSNQQQPPGSVSQEPRPPLQQSQVPPPEVRMTVPPLATSSAPVAVPSTAPVTYPMPQTPMGCPQPTPKMETPAIRPPPHGTTAPHKNSASVQNSSVAVLSVNHIKRPHSVPSSVQLPSTLSTQSACQNSVHPANKPIAPNFSAPLPFGPFSTLFENSPTSAHAFWGGSVVSSQSTPESMLSGKSSYLPNSDPLHQSDTSKAPGFRPPLQRPAPSPSGIVNMDSPYGSVTPSSTHLGNFASNISGGQMYGPGAPLGGAPAAANFNRQHFSPLSLLTPCSSASNDSSAQSVSSGVRAPSPAPSSVPLGSEKPSNVSQDRKVPVPIGTERSARIRQTGTSAPSVIGSNLSTSVGHSGIWSFEGIGGNQDKVDWCNPGMGNPMIHRPMSDPGVFSQHQAMERDSTGIVTPSGTFHQHVPAGYMDFPKVGGMPFSVYGNAMIPPVAPIPDGAGGPIFNGPHAADPSWNSLIKMVSSSTENNGPQTVWTGPWAPHMNSVHMNQLG

SEQ ID NO: 261 - DNA, 1209 bp, Homo sapiens
  D84212
atggaccgatctaaagaaaactgcatttcaggacctgttaaggctacagctccagttggaggtccaaaacgtgttctcgtgactcagcaatttccttgtcagaatccattacctgtaaatagtggccaggctcagcgggtcttgtgtccttcaaattcttcccagcgcgttcctttgcaagcacaaaagcttgtctccagtcacaagccggttcagaatcagaagcagaagcaattgcaggcaaccagtgtacctcatcctgtctccaggccactgaataacacccaaaagagcaagcagcccctgccatcgcacctgaaaataatcctgaggaggaactggcatcaaaacagaaaaatgaagaatcaaaaagaggcagtggctttggaagactttgaaattggtcgccctctgggtaaaggaaagtttggtaatgtttatttggcaagagaaaagcaaagcaagtttattctggctcttaaagtgttatttaaagctcagctggagaaagccggagtggagcatcagctcagaagagaagtagaaatacagtcccaccttcggcatcctaatattcttagactgtatggttatttccatgatgctaccagagtctacctaattctggaatatgcaccacttggaacagtttatagagaacttcagaaactttcaaagtttgatgagcagagaactgctaacttatataacagaattgcaaatgccctgtcttactgtcattcgaagagagttattcatagagacattaagccagagaacttacttcttggatcagctggagagcttaaaattgcagattttgggtggtcagtacatgctccatcttccaggaggaccactctctgtggcaccctggactacctgccccctgaaatgattgaaggtcggatgcatgatgagaaggtggatctctggagccttggagttctttgctatgaatttttagttgggaagcctccttttgaggcaaacacataccaagagacctacaaaagaatatcacgggttgaattcacattccctgactttgtaacagagggagccagggacctcatttcaagactgttgaagcataatcccagccagaggccaatgctcagagaagtacttgaacacccctggatcacagcaaattcatcaaaaccatcaaattgccaaaacaaagaatcagctagcaaacagtcttag

SEQ ID NO: 262 - protein, 403 aa, Homo sapiens
  O60445
MDRSKENCISGPVKATAPVGGPKRVLVTQQFPCQNPLPVNSGQAQRVLCPSNSSQRIPLQAQKLVSSHKPVQNQKQKQLQATSVPHPVSRPLNNTQKSKQPLPSAPENNPEEELASKQKNEESKKRQWALEDFEIGRPLGKGKFGNVYLAREKQSKFILALKVLFKAQLEKAGVEHQLRREVEIQSHLRHPNILRLYGYFHDATRVYLILEYAPLGTVYRELQKLSKFDEQRTATYITELANALSYCHSKRVIHRDIKPENLLLGSAGELKIADFGWSVHAPSSRRTTLCGTLDYLPPEMIEGRMHDEKVDLWSLGVLCYEFLVGKPPFEANTYQETYKRISRVEFTFPDFVTEGARDLISRLLKHNPSQRPMLREVLEHPWITANSSKPSNCQNKESASKQS

SEQ ID NO: 263 - DNA, 1035 bp, Homo sapiens
  AF008552
atggcccagaaggagaactcctacccctggccctacggccgacagacggctccatctggcctgagcaccctgccccagcgagtcctccggaaagagcctgtcaccccatctgcacttgtcctcatgagccgctccaatgtccagcccacagctgcccctggccagaaggtgatggagaatagcagtgggacacccgacatcttaacgcggcacttcacaattgatgactttgagattgggcgtcctctgggcaaaggcaagtttggaaacgtgtacttggctcgggagaagaaaagccatttcatcgtggcgctcaaggtcctcttcaagtcccagatagagaaggagggcgtggagcatcagctgcgcagagagatcgaaatccaggcccacctgcaccatcccaacatcctgcgtctctacaactatttttatgaccggaggaggatctacttgattctagagtatgccccccgcggggagctctacaaggagctgcagaagagctgcacatttgacgagcagcgaacagccacgatcatggaggagttggcagatgctctaatgtactgccatgggaagaaggtgattcacagagacataaagccagaaaatctgctcttagggctcaagggagagctgaagattgctgacttcggctggtctgtgcatgcgccctccctgaggaggaagacaatgtgtggcaccctggactacctgcccccagagatgattgaggggcgcatgcacaatgagaaggtggatctgtggtgcattggagtgctttgctatgagctgctggtggggaacccaccctttgagagtgcatcacacaacgagacctatcgccgcatcgtcaaggtggacctaaagttccccgcttctgtgcccacgggagcccaggacctcatctccaaactgctcaggcataacccctcggaacggctgcccctggcccaggtctcagcccacccttgggtccgggccaactctcggagggtgctgcctccctctgcccttcaatctgtcgcctga

SEQ ID NO: 264 - protein, 344 aa, Homo sapiens
  O60446
MAQKENSYPWPYGRQTAPSGLSTLPQRVLRKEPVTPSALVLMSRSNVQPTAAPGQKVMENSSGTPDILTRHFTIDDFEIGRPLGKGKFGNVYLAREKKSHFIVALKVLFKSQIEKEGVEHQLRREIEIQAHLHHPNILRLYNYFYDRRRIYLILEYAPRGELYKELQKSCTFDEQRTATIMEELADALMYCHGKKVIHRDIKPENLLLGLKGELKIADFGWSVHAPSLRRKTMCGTLDYLPPEMIEGRMHNEKVDLWCIGVLCYELLVGNPPFESASHNETYRRIVKVDLKFPASVPTGAQDLISKLLRHNPSERLPLAQVSAHPWVRANSRRVLPPSALQSVA

SEQ ID NO: 265 - DNA, 2637 bp, Homo sapiens
  AK027719
atggatcccaccgcgggaagcaagaaggagcctggaggaggcgcggcgactgaggagggcgtgaataggatcgcagtgccaaagccgccctccattgaggaattcagcatagtgaagcccattagccggggcgccttcgggaaagtgtatctggggcagaaaggcggcaaattgtatgcagtaaaggttgttaaaaaagcagacatgatcaacaaaaatatgactcatcaggtccaagctgagagagatgcactggcactaagcaaaagcccattcattgtccatttgtattattcactgcagtctgcaaacaatgtctacttggtaatggaatatcttattgggggagatgtcaagtctctcctacatatatatggttattttgatgaagagatggctgtgaaatatatttctgaagtagcactggctctagactaccttcacagacatggaatcatccacagggacttgaaaccggacaatatgcttatttctaatgagggtcatattaaactgacggattttggcctttcaaaagttactttgaatagagatattaatatgatggatatccttacaacaccatcaatggcaaaacctagacaagattattcaagaaccccaggacaagtgttatcgcttatcagctcgttgggatttaacacaccaattgcagaaaaaaatcaagaccctgcaaacatcctttcagcctgtctgtctgaaacatcacagctttctcaaggactcgtatgccctatgtctgtagatcaaaaggacactacgccttattctagcaaattactaaaatcatgtcttgaaacagttgcctccaacccaggaatgcctgtgaagtgtctaacttctaatttactccagtctaggaaaaggctggccacatccagtgccagtagtcaatcccacaccttcatatccagtgtggaatcagaatgccacagcagtcccaaatgggaaaaagattgccaggaaagtgatgaagcattgggcccaacaatgatgagttggaatgcagttgaaaagttatgcgcaaaatctgcaaatgccattgagacgaaaggtttcaataaaaaggatctggagttagctctttctcccattcataacagcagtgcccttcccaccactggacgctcttgtgtaaaccttgctaaaaaatgcttctctggggaagtttcttgggaagcagtagaactggatgtaaataatataaatatggacactgacacaagtcagttaggtttccatcagtcaaatcagtgggctgtggattctggtgggatatctgaagagcaccttgggaaaagaagtttaaaaagaaattttgagttggttgactccagtccttgtaaaaaaattatacagaataaaaaaacttgtgtagagtataagcataacgaaatgacaaattgttatacaaatcaaaatacaggcttaacagttgaagtgcaggaccttaagctatcagtgcacaaaagtcaacaaaatgactgtgctaataaggagaacattgtcaattcttttactgataaacaacaaacaccagaaaaattacctataccaatgatagcaaaaaaccttatgtgtgaactcgatgaagactgtgaaaagaatagtaagagggactacttaagttctagttttctatgttctgatgatgatagagcttctaaaaatatttctatgaactctgattcatcttttcctggaatttctataatggaaagtccattagaaagtcagcccttagattcagatagaagcattaaagaatcctcttttgaagaatcaaatattgaagatccacttattgtaacaccagattgccaagaaaagacctcaccaaaaggtgtcgagaaccctgctgtacaagagagtaaccaaaaaatgttaggtcctcctttggaggtgctgaaaacgttagcctctaaaagaaatgctgttgcttttcgaagttttaacagtcatattaatgcatccaataactcagaaccatccagaatgaacatgacttctttagatgcaatggatatttcgcgtgcctacagtggttcatatcccatggctataacccctactcaaaaaagaagatcctgtatgccacatcagaccccaaatcagatcaagtcgggaactccataccgaactccgaagagtgtgagaagaggggtggcccccgttgatgatgggcgaattctaggaaccccagactaccttgcacctgagctgttactaggcagggcccatggtcctgcggtagactggtgggcacttggagtttgcttgtttgaatttctaacaggaattccccctttcaatgatgaaacaccacaacaagtattccagaatattctgaaaagagatatcccttggccagaaggtgaagaaaagttatctgataatgctcaaagtgcagtagaaatacttttaaccattgatgatacaaagagagctggaatgaaagagctaaaacgtcatcctctcttcagtgatgtggactgggaaaatctgcagcatcagactatgcctttcatcccccagccagatgatgaaacagatacctcctattttgaaaccaggaatactgctcagcacctgaccgtatctggatttagtctgtag

SEQ ID NO: 266 - protein, 878 aa, Homo sapiens
  Q96SJ5
MDPTAGSKKEPGGGAATEEGVNRIAVPKPPSIEEFSIVKPISRGAFGKVYLGQKGGKLYAVKVVKKADMINKNMTHQVQAERDALALSKSPFIVHLYYSLQSANNVYLVMEYLIGGDVKSLLHIYGYFDEEMAVKYISEVALALDYLHRHGIIHRDLKPDNMLISNEGHIKLTDFGLSKVTLNRDINMMDILTTPSMAKPRQDYSRTPGQVLSLISSLGFNTPIAEKNQDPANILSACLSETSQLSQGLVCPMSVDQKDTTPYSSKLLKSCLETVASNPGMPVKCLTSNLLQSRKRLATSSASSQSHTFISSVESECHSSPKWEKDCQESDEALGPTMMSWNAVEKLCAKSANAIETKGFNKKDLELALSPIHNSSALPTTGRSCVNLAKKCFSGEVSWEAVELDVNNINMDTDTSQLGFHQSNQWAVDSGGISEEHLGKRSLKRNFELVDSSPCKKIIQNKKTCVEYKHNEMTNCYTNQNTGLTVEVQDLKLSVHKSQQNDCANKENIVNSFTDKQQTPEKLPIPMIAKNLMCELDEDCEKNSKRDYLSSSFLCSDDDRASKNISMNSDSSFPGISIMESPLESQPLDSDRSIKESSFEESNIEDPLIVTPDCQEKTSPKGVENPAVQESNQKMLGPPLEVLKTLASKRNAVAFRSFNSHINASNNSEPSRMNMTSLDAMDISRAYSGSYPMAITPTQKRRSCMPHQTPNQIKSGTPYRTPKSVRRGVAPVDDGRILGTPDYLAPELLLGRAHGPAVDWWALGVCLFEFLTGIPPFNDETPQQVFQNILKRDIPWPEGEEKLSDNAQSAVEILLTIDDTKRAGMKELKRHPLFSDVDWENLQHQTMPFIPQPDDETDTSYFETRNTAQHLTVSGFSL

SEQ ID NO: 267 - DNA, 4596 bp, Homo sapiens
  J04088
atggaagtgtcaccattgcagcctgtaaatgaaaatatgcaagtcaacaaaataaagaaaaatgaagatgctaagaaaagactgtctgttgaaagaatctatcaaaagaaaacacaattggaacatattttgctccgcccagacacctacattggttctgtggaattagtgacccagcaaatgtgggtttacgatgaagatgttggcattaactatagggaagtcacttttgttcctggtttgtacaaaatctttgatgagattctagttaatgctgcggacaacaaacaaagggacccaaaaatgtcttgtattagagtcacaattgatccggaaaacaatttaattagtatatggaataatggaaaaggtattcctgttgttgaacacaaagttgaaaagatgtatgtcccagctctcatatttggacagctcctaacttctagtaactatgatgatgatgaaaagaaagtgacaggtggtcgaaatggctatggagccaaattgtgtaacatattcagtaccaaatttactgtggaaacagccagtagagaatacaagaaaatgttcaaacagacatggatggataatatgggaagagctggtgagatggaactcaagcccttcaatggagaagattatacatgtatcacctttcagcctgatttgtctaagtttaaaatgcaaagcctggacaaagatattgttgcactaatggtcagaagagcatatgatattgctggatccaccaaagatgtcaaagtctttcttaatggaaataaactgccagtaaaaggatttcgtagttatgtggacatgtatttgaaggacaagttggatgaaactggtaactccttgaaagtaatacatgaacaagtaaaccacaggtgggaagtgtgtttaactatgagtgaaaaaggctttcagcaaattagctttgtcaacagcattgctacatccaagggtggcagacatgttgattatgtagctgatcagattgtgactaaacttgttgatgttgtgaagaagaagaacaagggtggtgttgcagtaaaagcacatcaggtgaaaaatcacatgtggatttttgtaaatgccttaattgaaaacccaacctttgactctcagacaaaagaaaacatgactttacaacccaagagctttggatcaacatgccaattgagtgaaaaatttatcaaagctgccattggctgtggtattgtagaaagcatactaaactgggtgaagtttaaggcccaagtccagttaaacaagaagtgttcagctgtaaaacataatagaatcaagggaattcccaaactcgatgatgccaatgatgcagggggccgaaactccactgagtgtacgcttatcctgactgagggagattcagccaaaactttggctgtttcaggccttggtgtggttgggagagacaaatatggggttttccctcttagaggaaaaatactcaatgttcgagaagcttctcataagcagatcatggaaaatgctgagattaacaatatcatcaagattgtgggtcttcagtacaagaaaaactatgaagatgaagattcattgaagacgcttcgttatgggaagataatgattatgacagatcaggaccaagatggttcccacatcaaaggcttgctgattaattttatccatcacaactggccctctcttctgcgacatcgttttctggaggaatttatcactcccattgtaaaggtatctaaaaacaagcaagaaatggcattttacagccttcctgaatttgaagagtggaagagttctactccaaatcataaaaaatggaaagtcaaatattacaaaggtttgggcaccagcacatcaaaggaagctaaagaatactttgcagatatgaaaagacatcgtatccagttcaaatattctggtcctgaagatgatgctgctatcagcctggcctttagcaaaaaacagatagatgatcgaaaggaatggttaactaatttcatggaggatagaagacaacgaaagttacttgggcttcctgaggattacttgtatggacaaactaccacatatctgacatataatgacttcatcaacaaggaacttatcttgttctcaaattctgataacgagagatctatcccttctatggtggatggtttgaaaccaggtcagagaaaggttttgtttacttgcttcaaacggaatgacaagcgagaagtaaaggttgcccaattagctggatcagtggctgaaatgtcttcttatcatcatggtgagatgtcactaatgatgaccattatcaatttggctcagaattttgtgggtagcaataatctaaacctcttgcagcccattggtcagtttggtaccaggctacatggtggcaaggattctgctagtccacgatacatctttacaatgctcagctctttggctcgattgttatttccaccaaaagatgatcacacgttgaagtttttatatgatgacaaccagcgtgttgagcctgaatggtacattcctattattcccatggtgctgataaatggtgctgaaggaatcggtactgggtggtcctgcaaaatccccaactttgatgtgcgtgaaattgtaaataacatcaggcgtttgatggatggagaagaacctttgccaatgcttccaagttacaagaacttcaagggtactattgaagaactggctccaaatcaatatgtgattagtggtgaagtagctattcttaattctacaaccattgaaatctcagagcttcccgtcagaacatggacccagacatacaaagaacaagttctagaacccatgttgaatggcaccgagaagacacctcctctcataacagactatagggaataccatacagataccactgtgaaatttgttgtgaagatgactgaagaaaaactggcagaggcagagagagttggactacacaaagtcttcaaactccaaactagtctcacatgcaactctatggtgctttttgaccacgtaggctgtttaaagaaatatgacacggtgttggatattctaagagacttttttgaactcagacttaaatattatggattaagaaaagaatggctcctaggaatgcttggtgctgaatctgctaaactgaataatcaggctcgctttatcttagagaaaatagatggcaaaataatcattgaaaataagcctaagaaagaattaattaaagttctgattcagaggggatatgattcggatcctgtgaaggcctggaaagaagcccagcaaaaggttccagatgaagaagaaaatgaagagagtgacaacgaaaaggaaactgaaaagagtgactccgtaacagattctggaccaaccttcaactatcttcttgatatgcccctttggtatttaaccaaggaaaagaaagatgaactctgcaggctaagaaatgaaaaagaacaagagctggacacattaaaaagaaagagtccatcagatttgtggaaagaagacttggctacatttattgaagaattggaggctgttgaagccaaggaaaaacaagatgaacaagtcggacttcctgggaaaggggggaaggccaaggggaaaaaaacacaaatggctgaagttttgccttctccgcgtggtcaaagagtcattccacgaataaccatagaaatgaaagcagaggcagaaaagaaaaataaaaagaaaattaagaatgaaaatactgaaggaagccctcaagaagatggtgtggaactagaaggcctaaaacaaagattagaaaagaaacagaaaagagaaccaggtacaaagacaaagaaacaaactacattggcatttaagccaatcaaaaaaggaaagaagagaaatccctggcctgattcagaatcagataggagcagtgacgaaagtaattttgatgtccctccacgagaaacagagccacggagagcagcaacaaaaacaaaattcacaatggatttggattcagatgaagatttctcagattttgatgaaaaaactgatgatgaagattttgtcccatcagatgctagtccacctaagaccaaaacttccccaaaacttagtaacaaagaactgaaaccacagaaaagtgtcgtgtcagaccttgaagctgatgatgttaagggcagtgtaccactgtcttcaagccctcctgctacacatttcccagatgaaactgaaattacaaacccagttcctaaaaagaatgtgacagtgaagaagacagcagcaaaaagtcagtcttccacctccactaccggtgccaaaaaaagggctgccccaaaaggaactaaaagggatccagctttgaattctggtgtctctcaaaagcctgatcctgccaaaaccaagaatcgccgcaaaaggaagccatccacttctgatgattctgactctaattttgagaaaattgtttcgaaagcagtcacaagcaagaaatccaagggggagagtgatgacttccatatggactttgactcagctgtggctcctcgggcaaaatctgtacgggcaaagaaacctataaagtacctggaagagtcagatgaagatgatctgttttaa

SEQ ID NO: 268 - protein, 1531 aa, Homo sapiens
  P11388
MEVSPLQPVNENMQVNKIKKNEDAKKRLSVERIYQKKTQLEHILLRPDTYIGSVELVTQQMWVYDEDVGINYREVTFVPGLYKIFDEILVNAADNKQRDPKMSCIRVTIDPENNLISIWNNGKGIPVVEHKVEKMYVPALIFGQLLTSSNYDDDEKKVTGGRNGYGAKLCNIFSTKFTVETASREYKKMFKQTWMDNMGRAGEMELKPFNGEDYTCITFQPDLSKFKMQSLDKDIVALMVRRAYDIAGSTKDVKVFLNGNKLPVKGFRSYVDMYLKDKLDETGNSLKVIHEQVNHRWEVCLTMSEKGFQQISFVNSIATSKGGRHVDYVADQIVTKLVDVVKKKNKGGVAVKAHQVKNHMWIFVNALIENPTFDSQTKENMTLQPKSFGSTCQLSEKFIKAAIGCGIVESILNWVKFKAQVQLNKKCSAVKHNRIKGIPKLDDANDAGGRNSTECTLILTEGDSAKTLAVSGLGVVGRDKYGVFPLRGKILNVREASHKQIMENAEINNIIKIVGLQYKKNYEDEDSLKTLRYGKIMIMTDQDQDGSHIKGLLINFIHHNWPSLLRHRFLEEFITPIVKVSKNKQEMAFYSLPEFEEWKSSTPNHKKWKVKYYKGLGTSTSKEAKEYFADMKRHRIQFKYSGPEDDAAISLAFSKKQIDDRKEWLTNFMEDRRQRKLLGLPEDYLYGQTTTYLTYNDFINKELILFSNSDNERSIPSMVDGLKPGQRKVLFTCFKRNDKREVKVAQLAGSVAEMSSYHHGEMSLMMTIINLAQNFVGSNNLNLLQPIGQFGTRLHGGKDSASPRYIFTMLSSLARLLFPPKDDHTLKFLYDDNQRVEPEWYIPIIPMVLINGAEGIGTGWSCKIPNFDVREIVNNIRRLMDGEEPLPMLPSYKNFKGTIEELAPNQYVISGEVAILNSTTIEISELPVRTWTQTYKEQVLEPMLNGTEKTPPLITDYREYHTDTTVKFVVKMTEEKLAEAERVGLHKVFKLQTSLTCNSMVLFDHVGCLKKYDTVLDILRDFFELRLKYYGLRKEWLLGMLGAESAKLNNQARFILEKIDGKIIIENKPKKELIKVLIQRGYDSDPVKAWKEAQQKVPDEEENEESDNEKETEKSDSVTDSGPTFNYLLDMPLWYLTKEKKDELCRLRNEKEQELDTLKRKSPSDLWKEDLATFIEELEAVEAKEKQDEQVGLPGKGGKAKGKKTQMAEVLPSPRGQRVIPRITIEMKAEAEKKNKKKIKNENTEGSPQEDGVELEGLKQRLEKKQKREPGTKTKKQTTLAFKPIKKGKKRNPWSDSESDRSSDESNFDVPPRETEPRRAATKTKFTMDLDSDEDFSDFDEKTDDEDFVPSDASPPKTKTSPKLSNKELKPQKSVVSDLEADDVKGSVPLSSSPPATHFPDETEITNPVPKKNVTVKKTAAKSQSSTSTTGAKKRAAPKGTKRDPALNSGVSQKPDPAKTKNRRKRKPSTSDDSDSNFEKIVSKAVTSKKSKGESDDFHMDFDSAVAPRAKSVRAKKPIKYLEESDEDDLF

SEQ ID NO: 269 - DNA, 4866 bp, Homo sapiens
  X68060
atggccaagtcgggtggctgcggcgcgggagccggcgtgggcggcggcaacggggcactgacctgggtgaacaatgctgcaaaaaaagaagagtcagaaactgccaacaaaaatgattcttcaaagaagttgtctgttgagagagtgtatcagaagaagacacaacttgaacacattcttcttcgtcctgatacatatattgggtcagtggagccattgacgcagttcatgtgggtgtatgatgaagatgtaggaatgaattgcagggaggttacctttgtgccaggtttatacaagatctttgatgaaattttggttaatgctgctgacaataaacagagggataagaacatgacttgtattaaagtttctattgatcctgaatctaacattataagcatttggaataatgggaaaggcattccagtagtagaacacaaggtagagaaagtttatgttcctgctttaatttttggacagcttttaacatccagtaactatgatgatgatgagaaaaaagttacaggtggtcgtaatggttatggtgcaaaactttgtaatattttcagtacaaagtttacagtagaaacagcttgcaaagaatacaaacacagttttaagcagacatggatgaataatatgatgaagacttctgaagccaaaattaaacattttgatggtgaagattacacatgcataacattccaaccagatctgtccaaatttaagatggaaaaacttgacaaggatattgtggccctcatgactagaagggcatatgatttggctggttcgtgtagaggggtcaaggtcatgtttaatggaaagaaattgcctgtaaatggatttcgcagttatgtagatctttatgtgaaagacaaattggatgaaactggggtggccctgaaagttattcatgagcttgcaaatgaaagatgggatgtttgtctcacattgagtgaaaaaggattccagcaaatcagctttgtaaatagtattgcaactacaaaaggtggacggcacgtggattatgtggtagatcaagttgttggtaaactgattgaagtagttaagaaaaagaacaaagctggtgtatcagtgaaaccatttcaagtaaaaaaccatatatgggtttttattaattgccttattgaaaatccaacttttgattctcagactaaggaaaacatgactctgcagcccaaaagttttgggtctaaatgccagctgtcagaaaaattttttaaagcagcctctaattgtggcattgtagaaagtatcctgaactgggtgaaatttaaggctcagactcagctgaataagaagtgttcatcagtaaaatacagtaaaatcaaaggtattcccaaactggatgatgctaatgatgctggtggtaaacattccctggagtgtacactgatattaacagagggagactctgccaaatcactggctgtgtctggattaggtgtgattggacgagacagatacggagtttttccactcaggggcaaaattcttaatgtacgggaagcttctcataaacagatcatggaaaatgctgaaataaataatattattaaaatagttggtctacaatataagaaaagttacgatgatgcagaatctctgaaaaccttacgctatggaaagattatgattatgaccgatcaggatcaagatggttctcacataaaaggcctgcttattaatttcatccatcacaattggccatcacttttgaagcatggttttcttgaagagttcattactcctattgtaaaggcaagcaaaaataagcaggaactttccttctacagtattcctgaatttgacgaatggaaaaaacatatagaaaaccagaaagcctggaaaataaagtactataaaggattgggtactagtacagctaaagaagcaaaggaatattttgctgatatggaaaggcatcgcatcttgtttagatatgctggtcctgaagatgatgctgccattaccttggcatttagtaagaagaagattgatgacagaaaagaatggttaacaaattttatggaagaccggagacagcgtaggctacatggcttaccagagcaatttttatatggtactgcaacaaagcatttgacttataatgatttcatcaacaaggaattgattctcttctcaaactcagacaatgaaagatctataccatctcttgttgatggctttaaacctggccagcggaaagttttatttacctgtttcaagaggaatgataaacgtgaagtaaaagttgcccagttggctggctctgttgctgagatgtcggcttatcatcatggagaacaagcattgatgatgactattgtgaatttggctcagaactttgtgggaagtaacaacattaacttgcttcagcctattggtcagtttggaactcggcttcatggtggcaaagatgctgcaagccctcgttatattttcacaatgttaagcactttagcaaggctactttttcctgctgtggatgacaacctccttaagttcctttatgatgataatcaacgtgtagagcctgagtggtatattcctataattcccatggttttaataaatggtgctgagggcattggtactggatgggcttgtaaactacccaactatgatgctagggaaattgtgaacaatgtcagacgaatgctagatggcctggatcctcatcccatgcttccaaactacaaaaactttaaaggcacgattcaagaacttggtcaaaaccagtatgcagtcagtggtgaaatatttgtagtggacagaaacacagtagaaattacagagcttccagttagaacttggacacaggtatataaagaacaggttttagaacctatgctaaatggaacagataaaacaccagcattaatttctgattataaagaatatcatactgacacaactgtgaaatttgtggtgaaaatgactgaagagaaactagcacaagcagaagctgctggactgcataaagtttttaaacttcaaactactcttacttgtaattccatggtactttttgatcatatgggatgtctgaagaaatatgaaactgtgcaagacattctgaaagaattctttgatttacgattaagttattacggtttacgtaaggagtggcttgtgggaatgttgggagcagaatctacaaagcttaacaatcaagcccgtttcattttagagaagatacaagggaaaattactatagagaataggtcaaagaaagatttgattcaaatgttagtccagagaggttatgaatctgacccagtgaaagcctggaaagaagcacaagaaaaggcagcagaagaggatgaaacacaaaaccagcatgatgatagttcctccgattcaggaactccttcaggcccagattttaattatattttaaatatgtctctgtggtctcttactaaagaaaaagttgaagaactgattaaacagagagatgcaaaagggcgagaggtcaatgatcttaaaagaaaatctccttcagatctttggaaagaggatttagcggcatttgttgaagaactggataaagtggaatctcaagaacgagaagatgttctggctggaatgtctggaaaagcaattaaaggtaaagttggcaaacctaaggtgaagaaactccagttggaagagacaatgccctcaccttatggcagaagaataattcctgaaattacagctatgaaggcagatgccagcaaaaagttgctgaagaagaagaagggtgatcttgatactgcagcagtaaaagtggaatttgatgaagaattcagtggagcaccagtagaaggtgcaggagaagaggcattgactccatcagttcctataaataaaggtcccaaacctaagagggagaagaaggagcctggtaccagagtgagaaaaacacctacatcatctggtaaacctagtgcaaagaaagtgaagaaacggaatccttggtcagatgatgaatccaagtcagaaagtgatttggaagaaacagaacctgtggttattccaagagattctttgcttaggagagcagcagccgaaagacctaaatacacatttgatttctcagaagaagaggatgatgatgctgatgatgatgatgatgacaataatgatttagaggaattgaaagttaaagcatctcccataacaaatgatggggaagatgaatttgttccttcagatgggttagataaagatgaatatacattttcaccaggcaaatcaaaagccactccagaaaaatctttgcatgacaaaaaaagtcaggattttggaaatctcttctcatttccttcatattctcagaagtcagaagatgattcagctaaatttgacagtaatgaagaagattctgcttctgttttttcaccatcatttggtctgaaacagacagataaagttccaagtaaaacggtagctgctaaaaagggaaaaccgtcttcagatacagtccctaagcccaagagagccccaaaacagaagaaagtagtagaggctgtaaactctgactcggattcagaatttggcattccaaagaagactacaacaccaaaaggtaaaggccgaggggcaaagaaaaggaaagcatctggctctgaaaatgaaggcgattataaccctggcaggaaaacatccaaaacaacaagcaagaaaccgaagaagacatcttttgatcaggattcagatgtggacatcttcccctcagacttccctactgagccaccttctctgccacgaaccggtcgggctaggaaagaagtaaaatattttacagagtctgatgaagaagaagatgatgttgattttgcaatgtttaattaa

SEQ ID NO: 270 - protein, 1626 aa, Homo sapiens
  Q02880
MAKSGGCGAGAGVGGGNGALTWVTLFDQNNAAKKEESETANKNDSSKKLSVERVYQKKTQLEHILLRPDTYIGSVEPLTQFMWVYDEDVGMNCREVTFVPGLYKIFDEILVNAADNKQRDKNMTCIKVSIDPESNIISIWNNGKGIPVVEHKVEKVYVPALIFGQLLTSSNYDDDEKKVTGGRNGYGAKLCNIFSTKFTVETACKEYKHSFKQTWMNNMMKTSEAKIKHFDGEDYTCITFQPDLSKFKMEKLDKDIVALMTRRAYDLAGSCRGVKVMFNGKKLPVNGFRSYVDLYVKDKLDETGVALKVIHELANERWDVCLTLSEKGFQQISFVNSIATTKGGRHVDYVVDQVVGKLIEVVKKKNKAGVSVKPFQVKNHIWVFINCLIENPTFDSQTKENMTLQPKSFGSKCQLSEKFFKAASNCGIVESILNWVKFKAQTQLNKKCSSVKYSKIKGIPKLDDANDAGGKHSLECTLILTEGDSAKSLAVSGLGVIGRDRYGVFPLRGKILNVREASHKQIMENAEINNIIKIVGLQYKKSYDDAESLKTLRYGKIMIMTDQDQDGSHIKGLLINFIHHNWPSLLKHGFLEEFITPIVKASKNKQELSFYSIPEFDEWKKHIENQKAWKIKYYKGLGTSTAKEAKEYFADMERHRILFRYAGPEDDAAITLAFSKKKIDDRKEWLTNFMEDRRQRRLHGLPEQFLYGTATKHLTYNDFINKELILFSNSDNERSIPSLVDGFKPGQRKVLFTCFKRNDKREVKVAQLAGSVAEMSAYHHGEQALMMTIVNLAQNFVGSNNINLLQPIGQFGTRLHGGKDAASPRYIFTMLSTLARLLFPAVDDNLLKFLYDDNQRVEPEWYIPIIPMVLINGAEGIGTGWACKLPNYDAREIVNNVRRMLDGLDPHPMLPNYKNFKGTIQELGQNQYAVSGEIFVVDRNTVEITELPVRTWTQVYKEQVLEPMLNGTDKTPALISDYKEYHTDTTVKFVVKMTEEKLAQAEAAGLHKVFKLQTTLTCNSMVLFDHMGCLKKYETVQDILKEFFDLRLSYYGLRKEWLVGMLGAESTKLNNQARFILEKIQGKITIENRSKKDLIQMLVQRGYESDPVKAWKEAQEKAAEEDETQNQHDDSSSDSGTPSGPDFNYILNMSLWSLTKEKVEELIKQRDAKGREVNDLKRKSPSDLWKEDLAAFVEELDKVESQEREDVLAGMSGKAIKGKVGKPKVKKLQLEETMPSPYGRRIIPEITAMKADASKKLLKKKKGDLDTAAVKVEFDEEFSGAPVEGAGEEALTPSVPINKGPKPKREKKEPGTRVRKTPTSSGKPSAKKVKKRNPWSDDESKSESDLEETEPVVIPRDSLLRRAAAERPKYTFDFSEEEDDDADDDDDDNNDLEELKVKASPITNDGEDEFVPSDGLDKDEYTFSPGKSKATPEKSLHDKKSQDFGNLFSFPSYSQKSEDDSAKFDSNEEDSASVFSPSFGLKQTDKVPSKTVAAKKGKPSSDTVPKPKRAPKQKKVVEAVNSDSDSEFGIPKKTTTPKGKGRGAKKRKASGSENEGDYNPGRKTSKTTSKKPKKTSFDQDSDVDIFPSDFPTEPPSLPRTGRARKEVKYFAESDEEEDDVDFAMFN

SEQ ID NO: 271 - DNA, 1845 bp, Homo sapiens
  M55040
atgaggcccccgcagtgtctgctgcacacgccttccctggcttccccactccttctcctcctcctctggctcctgggtggaggagtgggggctgagggccgggaggatgcagagctgctggtgacggtgcgtgggggccggctgcggggcattcgcctgaagacccccgggggccctgtctctgctttcctgggcatcccctttgcggagccacccatgggaccccgtcgctttctgccaccggagcccaagcagccttggtcaggggtggtagacgctacaaccttccagagtgtctgctaccaatatgtggacaccctatacccaggttttgagggcaccgagatgtggaaccccaaccgtgagctgagcgaggactgcctgtacctcaacgtgtggacaccatacccccggcctacatcccccacccctgtcctcgtctggatctatgggggtggcttctacagtggggcctcctccttggacgtgtacgatggccgcttcttggtacaggccgagaggactgtgctggtgtccatgaactaccgggtgggagcctttggcttcctggccctgccggggagccgagaggccccgggcaatgtgggtctcctggatcagaggctggccctgcagtgggtgcaggagaacgtggcagccttcgggggtgacccgacatcagtgacgctgtttggggagagcgcgggagccgcctcggtgggcatgcacctgctgtccccgcccagccggggcctgttccacagggccgtgctgcagagcggtgcccccaatggaccctgggccacggtgggcatgggagaggcccgtcgcagggccacgcagctggcccaccttgtgggctgtcctccaggcggcactggtgggaatgacacagagctggtagcctgccttcggacacgaccagcgcaggtcctggtgaaccacgaatggcacgtgctgcctcaagaaagcgtcttccggttctccttcgtgcctgtggtagatggagacttcctcagtgacaccccagaggccctcatcaacgcgggagacttccacggcctgcaggtgctggtgggtgtggtgaaggatgagggctcgtattttctggtttacggggccccaggcttcagcaaagacaacgagtctctcatcagccgggccgagttcctggccggggtgcgggtcggggttccccaggtaagtgacctggcagccgaggctgtggtcctgcattacacagactggctgcatcccgaggacccggcacgcctgagggaggccctgagcgatgtggtgggcgaccacaatgtcgtgtgccccgtggcccagctggctgggcgactggctgcccagggtgcccgggtctacgcctacgtctttgaacaccgtgcttccacgctctcctggcccctgtggatgggggtgccccacggctacgagatcgagttcatctttgggatccccctggacccctctcgaaactacacggcagaggagaaaatcttcgcccagcgactgatgcgatactgggccaactttgcccgcacaggggatcccaatgagccccgagaccccaaggccccacaatggcccccgtacacggcgggggctcagcagtacgttagtctggacctgcggccgctggaggtgcggcgggggctgcgcgcccaggcctgcgccttctggaaccgcttcctccccaaattgctcagcgccaccgacacgctcgacgaggcggagcgccagtggaaggccgagttccaccgctggagctcctacatggtgcactggaagaaccagttcgaccactacagcaagcaggatcgctgctcagacctgtga

SEQ ID NO: 272 - protein, 614 aa, Homo sapiens
  P22303
MRPPQCLLHTPSLASPLLLLLLWLLGGGVGAEGREDAELLVTVRGGRLRGIRLKTPGGPVSAFLGIPFAEPPMGPRRFLPPEPKQPWSGVVDATTFQSVCYQYVDTLYPGFEGTEMWNPNRELSEDCLYLNVWTPYPRPTSPTPVLVWIYGGGFYSGASSLDVYDGRFLVQAERTVLVSMNYRVGAFGFLALPGSREAPGNVGLLDQRLALQWVQENVAAFGGDPTSVTLFGESAGAASVGMHLLSPPSRGLFHRAVLQSGAPNGPWATVGMGEARRRATQLAHLVGCPPGGTGGNDTELVACLRTRPAQVLVNHEWHVLPQESVFRFSFVPVVDGDFLSDTPEALINAGDFHGLQVLVGVVKDEGSYFLVYGAPGFSKDNESLISRAEFLAGVRVGVPQVSDLAAEAVVLHYTDWLHPEDPARLREALSDVVGDHNVVCPVAQLAGRLAAQGARVYAYVFEHRASTLSWPLWMGVPHGYEIEFIFGIPLDPSRNYTAEEKIFAQRLMRYWANFARTGDPNEPRDPKAPQWPPYTAGAQQYVSLDLRPLEVRRGLRAQACAFWNRFLPKLLSATDTLDEAERQWKAEFHRWSSYMVHWKNQFDHYSKQDRCSDL

SEQ ID NO: 273 - DNA, 2610 bp, Homo sapiens
  AF006464
atgagagagctcgtcaacattccactggtacatattcttactctggttgccttcagcggaactgagaaacttccaaaagctcctgtcatcaccactcctcttgaaacagtggatgccttagttgaagaagtggctactttcatgtgtgcagtggaatcctacccccagcctgagatttcctggactagaaataaaattctcattaaactctttgacacccggtacagcatccgggagaatgggcagctcctcaccatcctgagtgtggaagacagtgatgatggcatttactgctgcacggccaacaatggtgtgggaggagctgtggagagttgtggagccctgcaagtgaagatgaaacctaaaataactcgccctcccataaatgtgaaaataatagagggattaaaagcagtcctaccatgtactacaatgggtaatcccaaaccatcagtgtcttggataaagggagacagccctctcagggaaaattcccgaattgcagttcttgaatctgggagcttgaggattcataacgtacaaaaggaagatgcaggacagtatcgatgtgtggcaaaaaacagcctcgggacagcatattccaaagtggtgaagctggaagttgaggtttttgccaggatcctgcgggctcctgaatcccacaatgtcacctttggctcctttgtgaccctgcactgtacagcaacaggcattcctgtccccaccatcacctggattgaaaacggaaatgctgtttcttctgggtccattcaagagagtgtgaaagaccgagtgattgactcaagactgcagctgtttatcaccaagccaggactctacacatgcatagctaccaataagcatggggagaagttcagtactgccaaggctgcagccaccatcagcatagcagaatggagtaaaccacagaaagataacaaaggctactgcgcccagtacagaggggaggtgtgtaatgcagtcctggcaaaagatgctcttgtttttctcaacacctcctatgcggaccctgaggaggcccaagagctactggtccacacggcctggaatgaactgaaagtagtgagcccagtctgccggccagctgctgaggctttgttgtgtaaccacatcttccaggagtgcagtcctggagtagtgcctactcctattcccatttgcagagagtactgcttggcagtaaaggagctcttctgcgcaaaagaatggctggtaatggaagagaagacccacagaggactctacagatccgagatgcatttgctgtccgtgccagaatgcagcaagcttcccagcatgcattgggaccccacggcctgtgccagactgccacatctagattataacaaagaaaacctaaaaacattcccaccaatgacgtcctcaaagccaagtgtggacattccaaatctgccttcctcctcctcttcttccttctctgtctcacctacatactccatgactgtaataatctccatcatgtccagctttgcaatatttgtgcttcttaccataactactctctattgctgccgaagaagaaaacaatggaaaaataagaaaagagaatcagcagcagtaaccctcaccacactgccttctgagctcttactagatagacttcatcccaaccccatgtaccagaggatgccgctccttctgaaccccaaattgctcagcctggagtatccaaggaataacattgaatatgtgagagacatcggagagggagcgtttggaagggtgtttcaagcaagggcaccaggcttacttccctatgaacctttcactatggtggcagtaaagatgctcaaagaagaagcctcggcagatatgcaagcggactttcagagggaggcagccctcatggcagaatttgacaaccctaacattgtgaagctattaggagtgtgtgctgtcgggaagccaatgtgcctgctctttgaatacatggcctatggtgacctcaatgagttcctccgcagcatgtcccctcacaccgtgtgcagcctcagtcacagtgacttgtctatgagggctcaggtctccagccctgggcccccacccctctcctgtgctgagcagctttgcattgccaggcaggtggcagctggcatggcttacctctcagaacgtaagtttgttcaccgagatttagccaccaggaactgcctggtgggcgagaacatggtggtgaaaattgccgactttggcctctccaggaacatctactcagcagactactacaaagctaatgaaaacgacgctatccctatccgttggatgccaccagagtccattttttataaccgctacactacagagtctgatgtgtgggcctatggcgtggtcctctgggagatcttctcctatggcctgcagccctactatgggatggcccatgaggaggtcatttactacgtgcgagatggcaacatcctctcctgccctgagaactgccccgtggagctgtacaatctcatgcgtctatgttggagcaagctgcctgcagacagacccagtttcaccagtattcaccgaattctggaacgcatgtgtgagagggcagagggaactgtgagtgtctaa

SEQ ID NO: 274 - protein, 869 aa, Homo sapiens
  O15146
MRELVNIPLVHILTLVAFSGTEKLPKAPVITTPLETVDALVEEVATFMCAVESYPQPEISWTRNKILIKLFDTRYSIRENGQLLTILSVEDSDDGIYCCTANNGVGGAVESCGALQVKMKPKITRPPINVKIIEGLKAVLPCTTMGNPKPSVSWIKGDSPLRENSRIAVLESGSLRIHNVQKEDAGQYRCVAKNSLGTAYSKVVKLEVEVFARILRAPESHNVTFGSFVTLHCTATGIPVPTITWIENGNAVSSGSIQESVKDRVIDSRLQLFITKPGLYTCIATNKHGEKFSTAKAAATISIAEWSKPQKDNKGYCAQYRGEVCNAVLAKDALVFLNTSYADPEEAQELLVHTAWNELKVVSPVCRPAAEALLCNHIFQECSPGVVPTPIPICREYCLAVKELFCAKEWLVMEEKTHRGLYRSEMHLLSVPECSKLPSMHWDPTACARLPHLDYNKENLKTFPPMTSSKPSVDIPNLPSSSSSSFSVSPTYSMTVIISIMSSFAIFVLLTITTLYCCRRRKQWKNKKRESAAVTLTTLPSELLLDRLHPNPMYQRMPLLLNPKLLSLEYPRNNIEYVRDIGEGAFGRVFQARAPGLLPYEPFTMVAVKMLKEEASADMQADFQREAALMAEFDNPNIVKLLGVCAVGKPMCLLFEYMAYGDLNEFLRSMSPHTVCSLSHSDLSMRAQVSSPGPPPLSCAEQLCIARQVAAGMAYLSERKFVHRDLATRNCLVGENMVVKIADFGLSRNIYSADYYKANENDAIPIRWMPPESIFYNRYTTESDVWAYGVVLWEIFSYGLQPYYGMAHEEVIYYVRDGNILSCPENCPVELYNLMRLCWSKLPADRPSFTSIHRILERMCERAEGTVSV

SEQ ID NO: 275 - DNA, 3213 bp, Homo sapiens
  U33635
atgggagctgcgcggggatccccggccagaccccgccggttgcctctgctcagcgtcctgctgctgccgctgctgggcggtacccagacagccattgtcttcatcaagcagccgtcctcccaggatgcactgcaggggcgccgggcgctgcttcgctgtgaggttgaggctccgggcccggtacatgtgtactggctgctcgatggggcccctgtccaggacacggagcggcgtttcgcccagggcagcagcctgagctttgcagctgtggacccgctgcaggactctggcaccttccagtgtgtggctcgggatgatgtcactggagaagaagcccgcagtgccaacgcctccttcaacatcaaatggattgaggcaggtcctgtggtcctgaagcatccagcctcggaagctgagatccagccacagacccaggtcaaacttcgttgccacattgatgggcaccctcggcccacctaccaatggttccgagatgggacccccctttctgatggtcagagcaaccacacagtcagcagcaaggagcggaacctgacgctccggccagctggtcctgagcatagtgggctgtattcctgctgcgcccacagtgcttttagccaggcttgcagcagccagaacttcaccttgagcattgctgatgaaagctttgccagggtggtgctggcaccccaggacgtggtagtagcgaggtatgaggaggccatgttccattgccagttctcagcccagccacccccgagcctgcagtggctctttgaggatgagactcccatcactaaccgcagtcgccccccacacctccgcagagccacagtgtttgccaacgggtctctgctgctgacccaggtccggccacgcaatgcagggatctaccgctgcattggccaggggcagaggggcccacccatcatcctggaagccacacttcacctagcagagattgaagacatgccgctatttgagccacgggtgtttacagctggcagcgaggagcgtgtgacctgccttccccccaagggtctgccagagcccagcgtgtggtgggagcacgcgggagtccggctgcccacccatggcagggtctaccagaagggccacgagctggtgttggccaatattgctgaaagtgatgctggtgtctacacctgccacgcggccaacctggctggtcagcggagacaggatgtcaacatcactgtggccactgtgccctcctggctgaagaagccccaagacagccagctggaggagggcaaacccggctacttggattgcctgacccaggccacaccaaaacctacagttgtctggtacagaaaccagatgctcatctcagaggactcacggttcgaggtcttcaagaatgggaccttgcgcatcaacagcgtggaggtgtatgatgggacatggtaccgttgtatgagcagcaccccagccggcagcatcgaggcgcaagccgtgctccaagtgctggaaaagctcaagttcacaccaccaccccagccacagcagtgcatggggtttgacaaggaggccacggtgccctgttcagccacaggccgagagaagcccactattaagtgggaacgggcagatgggagcagcctcccagagtgggtgacagacaacgctgggaccctgcattttgcccgggtgactcgagatgacgctggcaactacacttgcattgcctccaacgggccgcagggccagattcgtgcccatgtccagctcactgtggcagtttttatcaccttcaaagtggaaccagagcgtacgactgtgtaccagggccacacagccctactgcagtgcgaggcccagggggaccccaagccgctgattcagtggaaaggcaaggaccgcatcctggaccccaccaagctgggacccaggatgcacatcttccagaatggctccctggtgatccatgacgtggcccctgaggactcaggccgctacacctgcattgcaggcaacagctgcaacatcaagcacacggaggcccccctctatgtcgtggacaagcctgtgccggaggagtcggagggccctggcagccctcccccctacaagatgatccagaccattgggttgtcggtgggtgccgctgtggcctacatcattgccgtgctgggcctcatgttctactgcaagaagcgctgcaaagccaagcggctgcagaagcagcccgagggcgaggagccagagatggaatgcctcaacggtgggcctttgcagaacgggcagccctcagcagagatccaagaagaagtggccttgaccagcttgggctccggccccgcggccaccaacaaacgccacagcacaagtgataagatgcacttcccacggtctagcctgcagcccatcaccacgctggggaagagtgagtttggggaggtgttcctggcaaaggctcagggcttggaggagggagtggcagagaccctggtacttgtgaagagcctgcagagcaaggatgagcagcagcagctggacttccggagggagttggagatgtttgggaagctgaaccacgccaacgtggtgcggctcctggggctgtgccgggaggctgagccccactacatggtgctggaatatgtggatctggaagacctcaagcagttcctgaggatttccaagagcaaggatgaaaaattgaagtcacagcccctcagcaccaagcagaaggtggccctatgcacccaggtagccctgggaatggagcacctgtccaacaaccgctttgtgcataaggacttggctgcgcgtaactgcctggtcagtgcccagagacaagtgaaggtgtctgccctgggcctcagcaaggatgtgtacaacagtgagtactaccacttccgccaggcctgggtggcgctgcgctggatgtcccccgaggccatcctggagggtgacttctctaccaagtctgatgtctgggcctccggtgtgctgatgtgggaagtgtttacacatggagagatgccccatggtgggcaggcagatgatgaagtactggcagatttgcaggctgggaaggctagacttcctcagcccgagggctgcccttccaaactctatcggctgatgcagcgctgctgggccctcagccccaaggaccggccctccttcagtgagattgccagcgccctgggagacagcaccgtggacagcaagccgtga

SEQ ID NO: 276 - protein, 1070 aa, Homo sapiens [sequence omitted]

SEQ ID NO: 277 - DNA, 936 bp, Homo sapiens
  U51096
atgtacgtgagctacctcctggacaaggacgtgagcatgtaccctagctccgtgcgccactctggcggcctcaacctggcgccgcagaacttcgtcagccccccgcagtacccggactacggcggttaccacgtggcggccgcagctgcagcgcagaacttggacagcgcgcagtccccggggccatcctggccggcagcgtatggcgccccactccgggaggactggaatggctacgcgcccggaggcgcggccgccgccaacgccgtggctcacgcgctcaacggtggctccccggccgcagccatgggctacagcagccccgcagactaccatccgcaccaccacccgcatcaccacccgcaccacccggccgccgcgccttcctgcgcttctgggctgctgcaaacgctcaaccccggccctcctgggcccgccgccaccgctgccgccgagcagctgtctcccggcggccagcggcggaacctgtgcgagtggatgcggaagccggcgcagcagtccctcggcagccaagtgaaaaccaggacgaaagacaaatatcgagtggtgtacacggaccaccagcggctggagctggagaaggagtttcactacagtcgctacatcaccatccggaggaaagccgagctagccgccacgctggggctctctgagaggcaggttaaaatctggtttcagaaccgcagagcaaaggagaggaaaatcaacaagaagaagttgcagcagcaacagcagcagcagccaccacagccgcctccgccgccaccacagcctccccagcctcagccaggtcctctgagaagtgtcccagagcccttgagtccggtgtcttccctgcaagcctcagtgtctggctctgtccctggggttctggggccaactgggggggtgctaaaccccaccgtcacccagtga

SEQ ID NO: 278 - protein, 313 aa, Homo sapiens
  Q99626
MYVSYLLDKDVSMYPSSVRHSGGLNLAPQNFVSPPQYPDYGGYHVAAAAAAAANLDSAQSPGPSWPAAYGAPLREDWNGYAPGGAAAAANAVAHGLNGGSPAAAMGYSSPADYHPHHHPHHHPHHPAAAPSCASGLLQTLNPGPPGPAATAAAEQLSPGGQRRNLCEWMRKPAQQSLGSQVKTRTKDKYRVVYTDHQRLELEKEFHYSRYITIRRKAELAATLGLSERQVKIWFQNRRAKERKINKKKLQQQQQQQPPQPPPPPPQPPQPQPGPLRSVPEPLSPVSSLQASVSGSVPGVLGPTGGVLNPTVTQ

SEQ ID NO: 279 - DNA, 3507 bp, Homo sapiens
  AF250226
atgtcatggtttagtggcctcctggtccctaaagtggatgaacggaaaacagcctggggcgaacgcaatgggcagaagcgttcgcggcgccgtggcactcgggcaggtggcttctgcacgccccgctatatgagctgcctccgggatgcagagccacccagccccacccctgccggcccccctcggtgcccctggcaggatgacgccttcatccggaggggcggcccaggcaagggcaaggagctggggctgcgggcagtggccctgggcttcgaggataccgaggtgacaacgacagcgggcgggacggctgaggtggcgcccgacgcggtgcccaggagtgggcgatcctgctggcgccgtctggtgcaggtgttccagtcgaagcagttccgttcggccaagctggagcgcctgtaccagcggtacttcttccagatgaaccagagcagcctgacgctgctgatggcggtgctggtgctgctcacagcggtgctgctggctttccacgccgcacccgcccgccctcagcctgcctatgtggcactgttggcctgtgccgccgccctgttcgtggggctcatggtggtgtgtaaccggcatagcttccgccaggactccatgtgggtggtgagctacgtggtgctgggcatcctggcggcagtgcaggtcgggggcgctctcgcagcagacccgcgcagcccctctgcgggcctctggtgccctgtgttctttgtctacatcgcctacacgctcctccccatccgcatgcgggctgccgtcctcagcggcctgggcctctccaccttgcatttgatcttggcctggcaacttaaccgtggtgatgccttcctctggaagcagctcggtgccaatgtgctgctgttcctctgcaccaacgtcattggcatctgcacacactatccagcagaggtgtctcagcgccaggcctttcaggagacccgcggttacatccaggcccggctccacctgcagcatgagaatcggcagcaggagcggctgctgctgtcggtattgccccagcacgttgccatggagatgaaagaagacatcaacacaaaaaaagaagacatgatgttccacaagatctacatacagaagcatgacaatgtcagcatcctgtttgcagacattgagggcttcaccagcctggcatcccagtgcactgcgcaggagctggtcatgaccctgaatgagctctttgcccggtttgacaagctggctgcggagaatcactgcctgaggatcaagatcttgggggactgttactactgtgtgtcagggctgccggaggcccgggccgaccatgcccactgctgtgtggagatgggggtagacatgattgaggccatctcgctggtacgtgaggtgacaggtgtgaatgtgaacatgcgcgtgggcatccacagcgggcgcgtgcactgcggcgtccttggcttgcggaaatggcagttcgatgtgtggtccaatgatgtgaccctggccaaccacatggaggcaggaggccgggctggccgcatccacatcactcgggcaacactgcagtacctgaacggggactacgaggtggagccaggccgtggtggcgagcgcaacgcgtacctcaaggagcagcacattgagactttcctcatcctgggcgccagccagaaacggaaagaggagaaggccatgctggccaagctgcagcggactcgggccaactccatggaagggctgatgccgcgctgggttcctgatcgtgccttctcccggaccaaggactccaaggccttccgccagatgggcattgatgattccagcaaagacaaccggggcacccaagatgccctgaaccctgaggatgaggtggatgagttcctgagccgtgccatcgatgcccgcagcattgatcagctgcggaaggaccatgtgcgccggtttctgctcaccttccagagagaggatcttgagaagaagtactcccggaaggtggatccccgcttcggagcctacgttgcctgtgccctgttggtcttctgcttcatctgcttcatccagcttctcatcttcccacactccaccctgatgcttgggatctatgccagcatcttcctgctgctgctaatcaccgtgctgatctgtgctgtgtactcctgtggttctctgttccctaaggccctgcaacgtctgtcccgcagcattgtccgctcacgggcacatagcaccgcagttggcatcttttccgtcctgcttgtgtttacttctgccattgccaacatgttcacctgtaaccacacccccatacggagctgtgcagcccggatgctgaatttaacacctgctgacatcactgcctgccacctgcagcagctcaattactctctgggcctggatgctcccctgtgtgagggcaccatgcccacctgcagctttcctgagtacttcatcgggaacatgctgctgagtctcttggccagctctgtcttcctgcacatcagcagcatcgggaagttggccatgatctttgtcttggggctcatctatttggtgctgcttctgctgggtcccccagccaccatctttgacaactatgacctactgcttggcgtccatggcttggcttcttccaatgagacctttgatgggctggactgtccagctgcagggagggtggccctcaaatatatgacccctgtgattctgctggtgtttgcgctggcgctgtatctgcatgctcagcaggtggagtcgactgcccgcctagacttcctctggaaactacaggcaacaggggagaaggaggagatggaggagctacaggcatacaaccggaggctgctgcataacattctgcccaaggacgtggcggcccacttcctggcccgggagcgccgcaatgatgaactctactatcagtcgtgtgagtgtgtggctgttatgtttgcctccattgccaacttctctgagttctatgtggagctggaggcaaacaatgagggtgtcgagtgcctgcggctgctcaacgagatcatcgctgactttgatgagattatcagcgaggagcggttccggcagctggaaaagatcaagacgattggtagcacctacatggctgcctcagggctgaacgccagcacctacgatcaggtgggccgctcccacatcactgccctggctgactacgccatgcggctcatggagcagatgaagcacatcaatgagcactccttcaacaatttccagatgaagattgggctgaacatgggcccagtcgtggcaggtgtcatcggggctcggaagccacagtatgacatctgggggaacacagtgaatgtctctagtcgtatggacagcacgggggtccccgaccgaatccaggtgaccacggacctgtaccaggttctagctgccaagggctaccagctggagtgtcgaggggtggtcaaggtgaagggcaagggggagatgaccacctacttcctcaatgggggccccagcagttaa

SEQ ID NO: 280 - protein, 1168 aa, Homo sapiens
  O43306
MSWFSGLLVPKVDERKTAWGERNGQKRSRRRGTRAGGFCTPRYMSCLRDAEPPSPTPAGPPRCPWQDDAFIRRGGPGKGKELGLRAVALGFEDTEVTTTAGGTAEVAPDAVPRSGRSCWRRLVQVFQSKQFRSAKLERLYQRYFFQMNQSSLTLLMAVLVLLTAVLLAFHAAPARPQPAYVALLACAAALFVGLMVVCNRHSFRQDSMWVVSYVVLGILAAVQVGGALAADPRSPSAGLWCPVFFVYIAYTLLPIRMRAAVLSGLGLSTLHLILAWQLNRGDAFLWKQLGANVLLFLCTNVIGICTHYPAEVSQRQAFQETRGYIQARLHLQHENRQQERLLLSVLPQHVAMEMKEDINTKKEDMMFHKIYIQKHDNVSILFADIEGFTSLASQCTAQELVMTLNELFARFDKLAAENHCLRIKILGDCYYCVSGLPEARADHAHCCVEMGVDMIEAISLVREVTGVNVNMRVGIHSGRVHCGVLGLRKWQFDVWSNDVTLANHMEAGGRAGRIHITRATLQYLNGDYEVEPGRGGERNAYLKEQHIETFLILGASQKRKEEKAMLAKLQRTRANSMEGLMPRWVPDRAFSRTKDSKAFRQMGIDDSSKDNRGTQDALNPEDEVDEFLSRAIDARSIDQLRKDHVRRFLLTFQREDLEKKYSRKVDPRFGAYVACALLVFCFICFIQLLIFPHSTLMLGIYASIFLLLLITVLICAVYSCGSLFPKALQRLSRSIVRSRAHSTAVGIFSVLLVFTSAIANMFTCNHTPIRSCAARMLNLTPADITACHLQQLNYSLGLDAPLCEGTMPTCSFPEYFIGNMLLSLLASSVFLHISSIGKLAMIFVLGLIYLVLLLLGPPATIFDNYDLLLGVHGLASSNETFDGLDCPAAGRVALKYMTPVILLVFALALYLHAQQVESTARLDFLWKLQATGEKEEMEELQAYNRRLLHNILPKDVAAHFLARERRNDELYYQSCECVAVMFASIANFSEFYVELEANNEGVECLRLLNEIIADFDEIISEERFRQLEKIKTIGSTYMAASGLNASTYDQVGRSHITALADYAMRLMEQMKHINEHSFNNFQMKIGLNMGPVVAGVIGARKPQYDIWGNTVNVSSRMDSTGVPDRIQVTTDLYQVLAAKGYQLECRGVVKVKGKGEMTTYFLNGGPSS

SEQ ID NO: 281 - DNA, 3829 bp, Homo sapiens
  AB082530
ggcaaacacaattcttcctcattcacatagccatcatttacactgcttgccaaccctaatgaatatggctgcatcctttgatatccccaaggaaaagagactgcgagccagtgcagccttgaactgtttaaaacgcttccatgaaatgaagaaacgaggacctaagccttatagtcttcatttagaccacattattcagaaagcaattgcaacacaccagaaacgggatcagtatctccgagttcagaaagatatatttatccttaaggatacagaggaagctcttttaattaaccttagagatagccaagtccttcaacataaagagaatcttgaatggaattggaatcttatagggaccattcttaagtggccaaatgtaaatctaagaaactataaagatgaacagttacacaggtttgtacgaagactactttatttttacaagcccagcagtaaattatatgccaacctggatctggattttgccaaggccaaacagctcacggttgtaggttgccagtttacagaatttcttcttgaatctgaagaggatgggcaaggctacttagaagatctagtaaaggatattgttcagtggctcaatgcttcatctggaatgaaacccgaaagaagtcttcaaaataatggtttattgaccacccttagtcaacactactttttatttattggaacactttcttgccaccctcatggagttaaaatgctggaaaaatgcagtgtatttcagtgtctccttaatctttgctccttgaaaaaccaagatcacttgctaaaacttactgtttctagcttggactatagcagagatggattggctagagtcatcctttccaaaattttaactgcagctactgatgcctgcagactctatgcaacaaaacatttaagggtattattgagagctaatgttgaattctttaataattggggaattgagttgttagtgacccagctacatgataaaaacaaaacgatttcctctgaagctcttgatatcctcgatgaagcatgtgaagacaaggccaatcttcatgctctcattcagatgaaaccagcgttatcccaccttggagacaagggtttgcttctcctgctgagatttctctccattccaaaaggattttcctatctgaatgaaagaggttatgtagcaaaacaattggaaaagtggcacagggaatacaactccaaatatgttgacttgattgaggaacaactcaatgaagcacttactacttaccggaagcctgttgatggtgataactatgttcgtcggagtaaccaaagattacagcgtcctcacgtctacctgcctatacacctttatggacaactagtacaccataaaacaggctgccatttgttggaagtacagaatattattacagaactctgtcgtaatgttcgtacaccagatttggataagtgggaagaaattaaaaaactgaaagcatctctttgggccttgggaaatatcggctcatcaaattggggtctcaatttgctacaggaagaaaacgtgattccagatatactaaaacttgcaaaacagtgtgaagttctttccatcagagggacctgtgtatatgtacttgggctcatagctaaaaccaaacaaggctgtgatattctaaaatgtcacaactgggatgctgtgaggcatagtcgcaaacatctgtggccagtggttccagatgatgtggaacaactctgtaatgaactttcatctatcccaagcactctaagtttgaactcggagtcaaccagctctagacataatagtgaaagtgaatctgtgccatcgagtatgttcatattggaggatgaccggtttggcagcagctctactagtacatttttccttgatatcaatgaagatacagagccaacattttatgaccgatctggacccataaaggataaaaattcattccctttctttgcttctagtaaacttgtgaagaatcgtatcttaaattcgcttactttgcctaacaaaaaacatcgtagtagcagtgatccaaaaggagggaaattatcatctgaaagtaagacaagcaacaggcgaatcagaacacttacggagcccagtgttgattttaatcatagtgatgattttacacccatatccactgtacagaaaacattacaattagagacttcatttatggggaataagcacattgaagacactggtagtacaccaagcattggagaaaatgacttaaaattcaccaagaattttggtacagagaatcacagagaaaatacaagccgagagaggttagtagtagaaagttcaacgagctcacatatgaagatacgtagccaaagtttcaatacagacactacaacaagtggcataagttcaatgagctcaagtccttcacgagagacagtaggtgtagatgctacaactatggacacagactgtggaagcatgagtactgtggtaagtactaaaactattaagacaagccactatttgacgccacagtctaaccatctgtctctctccaaatcaaattcggtgtccctggtgcctccaggttcttctcatacgcttcctagaagagcacagtcccttaaagcaccctctattgctacaattaaaagtctagcagattgtaactttagttacacaagttctagagatgcttttggctatgctacactgaaaagactacagcaacaaagaatgcatccatccttatctcactctgaagctttggcatctccagcaaaagatgtgctatttactgataccatcaccatgaaggccaacagttttgagtccagattaacaccaagcaggttcatgaaagccttaagttatgcatcattagataaagaagatttattgagtcctattaatcaaaataccctgcaacgatcttcctcagtgcggtccatggtgtccagtgccacatatgggggttcagatgattacattggtcttgctctcccggtggatataaatgatatattccaggtaaaggatattccctattttcagacaaaaaacataccaccacatgatgatcgaggtgcaagagcatttgcccatgatgcaggaggtcttccatctggaactggaggtcttgtaaaaaattcttttcacttgctacgacagcagatgagtcttacggaaataatgaattcaatccattcagatgcctctctgtttttagaaagtacagaagacactggactacaggaacatacagatgataactgcctttattgtgtctgtattgaaattctgggtttccagcccagcaaccaactgagtgcaatatgtagtcattcagactttcaagatattccatattctgattggtgtgagcagactatccataatcctttagaagtggttccctctaagttttcggggatttctggatgcagtgatggggtgtctcaagaaggctcagctagcagcaccaaaagcacagaattgttactaggtgttaaaacaattccagatgatacaccaatgtgccgtatactccttcgcaaagaagttctaagattagtcattaatttgagtagttcagtttcaactaaatgtcatgagactgggcttttaacaattaaggagaagtatcctcaaacatttgatgacatatgcctttactctgaggtttcccatttgctgtcacactgcacattcagacttccgtgtcggaggttcatacaagaattatttcaagatgtacagtttctacaaatgcatgaagaagcagaggctgtgttggcaacaccaccaaagcaacctatagttgatacatctgctgaatcctga

SEQ ID NO: 282 - protein, 1275 aa, Homo sapiens
  Q8NCM6; BAC02708
ANTILPHSHSHHLHCLPTLMNMAASFDIPKEKRLRASAALNCLKRFHEMKKRGPKPYSLHLDHIIQKAIATHQKRDQYLRVQKDIFILKDTEEALLINLRDSQVLQHKENLEWNWNLIGTILKWPNVNLRNYKDEQLHRFVRRLLYFYKPSSKLYANLDLDFAKAKQLTVVGCQFTEFLLESEEDGQGYLEDLVKDIVQWLNASSGMKPERSLQNNGLLTTLSQHYFLFIGTLSCHPHGVKMLEKCSVFQCLLNLCSLKNQDHLLKLTVSSLDYSRDGLARVILSKILTAATDACRLYATKHLRVLLRANVEFFNNWGIELLVTQLHDKNKTISSEALDILDEACEDKANLHALIQMKPALSHLGDKGLLLLLRFLSIPKGFSYLNERGYVAKQLEKWHREYNSKYVDLIEEQLNEALTTYRKPVDGDNYVRRSNQRLQRPHVYLPIHLYGQLVHHKTGCHLLEVQNIITELCRNVRTPDLDKWEEIKKLKASLWALGNIGSSNWGLNLLQEENVIPDILKLAKQCEVLSIRGTCVYVLGLIAKTKQGCDILKCHNWDAVRHSRKHLWPVVPDDVEQLCNELSSIPSTLSLNSESTSSRHNSESESVPSSMFILEDDRFGSSSTSTFFLDINEDTEPTFYDRSGPIKDKNSFPFFASSKLVKNRILNSLTLPNKKHRSSSDPKGGKLSSESKTSNRRIRTLTEPSVDFNHSDDFTPISTVQKTLQLETSFMGNKHIEDTGSTPSIGENDLKFTKNFGTENHRENTSRERLVVESSTSSHMKIRSQSFNTDTTTSGISSMSSSPSRETVGVDATTMDTDCGSMSTVVSTKTIKTSHYLTPQSNHLSLSKSNSVSLVPPGSSHTLPRRAQSLKAPSIATIKSLADCNFSYTSSRDAFGYATLKRLQQQRMHPSLSHSEALASPAKDVLFTDTITMKANSFESRLTPSRFMKALSYASLDKEDLLSPINQNTLQRSSSVRSMVSSATYGGSDDYIGLALPVDINDIFQVKDIPYFQTKNIPPHDDRGARAFAHDAGGLPSGTGGLVKNSFHLLRQQMSLTEIMNSIHSDASLFLESTEDTGLQEHTDDNCLYCVCIEILGFQPSNQLSAICSHSDFQDIPYSDWCEQTIHNPLEVVPSKFSGISGCSDGVSQEGSASSTKSTELLLGVKTIPDDTPMCRILLRKEVLRLVINLSSSVSTKCHETGLLTIKEKYPQTFDDICLYSEVSHLLSHCTFRLPCRRFIQELFQDVQFLQMHEEAEAVLATPPKQPIVDTSAES

SEQ ID NO: 283 - DNA, 993 bp, Homo sapiens
  M13928
atgcagccccagtccgttctgcacagcggctacttccacccactacttcgggcctggcagacagccaccaccaccctcaatgcctccaacctcatctaccccatctttgtcacggatgttcctgatgacatacagcctatcaccagcctcccaggagtggccaggtatggtgtgaagcggctggaagagatgctgaggcccttggtggaagagggcctacgctgtgtcttgatctttggcgtccccagcagagttcccaaggacgagcggggttccgcagctgactccgaggagtccccagctattgaggcaatccatctgttgaggaagaccttccccaacctcctggtggcctgtgatgtctgcctgtgtccctacacctcccatggtcactgcgggctcctgagtgaaaacggagcattccgggctgaggagagccgccagcggctggctgaggtggcattggcgtatgccaaggcaggatgtcaggtggtagccccgtcggacatgatggatggacgcgtggaagccatcaaagaggccctgatggcacatggacttggcaacagggtatcggtgatgagctacagtgccaaatttgcttcctgtttctatggccctttccgggatgcagctaagtcaagcccagcttttggggaccgccgctgctaccagctgccccctggagcacgaggcctggctctccgagctgtggaccgggatgtacgggaaggagctgacatgctcatggtgaagccgggaatgccctacctggacatcgtgcgggaggtaaaggacaagcaccctgacctccctctcgccgtgtaccacgtctctggagagtttgccatgctgtggcatggagcccaggccggggcatttgatctcaaggctgccgtactggaggccatgactgccttccgcagagcaggtgctgacatcatcatcacctactacacaccgcagctgctgcagtggctgaaggaggaatga

SEQ ID NO: 284 - protein, 330 aa, Homo sapiens
  P13716
MQPQSVLHSGYFHPLLRAWQTATTTLNASNLIYPIFVTDVPDDIQPITSLPGVARYGVKRLEEMLRPLVEEGLRCVLIFGVPSRVPKDERGSAADSEESPAIEAIHLLRKTFPNLLVACDVCLCPYTSHGHCGLLSENGAFRAEESRQRLAEVALAYAKAGCQVVAPSDMMDGRVEAIKEALMAHGLGNRVSVMSYSAKFASCFYGPFRDAAKSSPAFGDRRCYQLPPGARGLALRAVDRDVREGADMLMVKPGMPYLDIVREVKDKHPDLPLAVYHVSGEFAMLWHGAQAGAFDLKAAVLEAMTAFRRAGADIIITYYTPQLLQWLKEE

SEQ ID NO: 285 - DNA, 1884 bp, Homo sapiens
  AK001360
atgtttatggcacagattagtcactgctacccagagtacctaagtaattttcctcaagaggtgaaagatcttctctcctgcaatcataccgtattggatccagatctgcgaatgacattttgcaaagctttgatcttgctgagaaataagaatctcatcaatccatcaagcctgctagaactcttctttgaactttttcgttgccatgataaacttctgcgaaagactttatacacacatattgtgactgatatcaagaatataaatgcaaaacacaagaacaataaagtgaatgtagtattgcaaaatttcatgtacaccatgttaagagatagcaatgcaaccgcagccaagatgtctttagatgtaatgattgaactctacagaaggaacatctggaatgatgcaaaaactgtcaatgttatcacaactgcatgtttctctaaggtcaccaagatattagttgccgctttgacattctttcttgggaaagatgaagatgaaaaacaggacagtgactccgaatctgaggatgatggaccaacagcaagagacctgctagtacaatatgctacagggaagaaaagttccaaaaacaagaaaaagttggaaaaggcaatgaaagtgctcaagaaacaaaaaaagaagaaaaaaccagaggtgtttaacttttcagccattctcttgattcatgatccccaagattttgcggaaaaactactaaagcagcttgagtgctgtaaggagaggtttgaagtgaagatgatgctcatgaaccttatctccagattggtgggaattcatgagcttttcctcttcaatttctatccctttttgcaaaggtttctgcagccccaccaaagagaagtaaccaagatccttctgtttgctgcacaagcatctcatcacctagtacccccagagattattcaatcattgcttatgactgtggcaaacaattttgttaccgacaagaactctggagaagtcatgacagtaggaatcaatgctataaaggagataacagctcgatgtcctctggccatgactgaagaacttctccaagacctggctcagtataaaacacacaaggataagaatgtaatgatgtctgctagaactttgattcacctcttccgaacactgaatcctcagatgctgcagaagaaattccggggtaagcctacagaggcctccatagaagcaagagtacaagaatatggagaattagatgctaaagattacattccaggagcagaagttctggaagttgagaaagaagagaatgctgaaaatgatgaagatggatgggaaagtaccagtctcagtgaggaggaggatgctgatggtgaatggattgatgtgcaacactcttccgatgaagaacagcaagaaatctccaagaagctgaacagcatgcccatggaggagcggaaggccaaagctgcagccatcagcactagccgagttttaactcaggaagacttccagaaaatccgcatggcccaaatgagaaaagaacttgatgctgcccccgggaaatgccagaagaggaaatacattgaaatagacagtgatgaagagcccaggggtgaattactttctcttcgggacattgaacgccttcataaaaagccaaagtctgacaaagagacaagactagcaactgcaatggctggaaagacagaccgaaaagaatttgtgaggaagaaaaccaaaacaaatccattttccagttcgacaaataaagagaagaaaaaacagaagaactttatgatgatgcggtatagccagaatgtccggtcaaaaaataagcgttccttccgagaaaaacagttggcactacgagatgcacttttgaaaaagagaaaaagaatgaagtaa

SEQ ID NO: 286 - protein, 627 aa, Homo sapiens
  Q9NVU7
MFMAQISHCYPEYLSNFPQEVKDLLSCNHTVLDPDLRMTFCKALILLRNKNLINPSSLLELFFELFRCHDKLLRKTLYTHIVTDIKNINAKHKNNKVNVVLQNFMYTMLRDSNATAAKMSLDVMIELYRRNIWNDAKTVNVITTACFSKVTKILVAALTFFLGKDEDEKQDSDSESEDDGPTARDLLVQYATGKKSSKNKKKLEKAMKVLKKQKKKKKPEVFNFSAILLIHDPQDFAEKLLKQLECCKERFEVKMMLMNLISRLVGIHELFLFNFYPFLQRFLQPHQREVTKILLFAAQASHHLVPPEIIQSLLMTVANNFVTDKNSGEVMTVGINAIKEITARCPLAMTEELLQDLAQYKTHKDKNVMMSARTLIHLFRTLNPQMLQKKFRGKPTEASIEARVQEYGELDAKDYIPGAEVLEVEKEENAENDEDGWESTSLSEEEDADGEWIDVQHSSDEEQQEISKKLNSMPMEERKAKAAAISTSRVLTQEDFQKIRMAQMRKELDAAPGKCQKRKYIEIDSDEEPRGELLSLRDIERLHKKPKSDKETRLATAMAGKTDRKEFVRKKTKTNPFSSSTNKEKKKQKNFMMMRYSQNVRSKNKRSFREKQLALRDALLKKRKRMK

SEQ ID NO: 287 - DNA, 1668 bp, Homo sapiens
  AY033889
atgcaaagttgtgaatccagtggtgacagtgcggatgaccctctcagtcgcggcctacggagaaggggacagcctcgtgtggtggtgatcggcgccggcttggctggcctggctgcagccaaagcacttcttgagcagggtttcacggatgtcactgtgcttgaggcttccagccacatcggaggccgtgtgcagagtgtgaaacttggacacgccacctttgagctgggagccacctggatccatggctcccatgggaaccctatctatcatctagcagaagccaacggcctcctggaagagacaaccgatggggaacgcagcgtgggccgcatcagcctctattccaagaatggcgtggcctgctaccttaccaaccacggccgcaggatccccaaggacgtggttgaggaattcagcgatttatacaacgaggtctataacttgacccaggagttcttccggcacgataaaccagtcaatgctgaaagtcaaaatagcgtgggggtgttcacccgagaggaggtgcgtaaccgcatcaggaatgaccctgacgacccagaggctaccaagcgcctgaagctcgccatgatccagcagtacctgaaggtggagagctgtgagagcagctcacacagcatggacgaggtgtccctgagcgccttcggggagtggaccgagatccccggcgctcaccacatcatcccctcgggcttcatgcgggttgtggagctgctggcggagggcatccctgcccacgtcatccagctagggaaacctgtccgctgcattcactgggaccaggcctcagcccgccccagaggccctgagattgagccccggggtgagggcgaccacaatcacgacactggggagggtggccagggtggagaggagccccgggggggcaggtgggatgaggatgagcagtggtcggtggtggtggagtgcgaggaccgtgagctgatcccggcggaccatgtgattgtgaccgtgtcgctaggtgtgctaaagaggcagtacaccagtttcttccggccaggcctgcccacagagaaggtggctgccatccaccgcctgggcattggcaccaccgacaagatctttctggaattcgaggagcccttctggggccctgagtgcaacagcctacagtttgtgtgggaggacgaagcggagagccacaccctcacctacccacctgagctctggtaccgcaagatctgcggctttgatgtcctctacccgcctgagcgctacggccatgtgctgagcggctggatctgcggggaggaggccctcgtcatggagaagtgtgatgacgaggcagtggccgagatctgcacggagatgctgcgtcagttcacagggaaccccaacattccaaaacctcggcgaatcttgcgctcggcctggggcagcaacccttacttccgtggctcctattcatacacgcaggtgggctccagcggggcggatgtggagaagctggccaagcccctgccgtacacggagagctcaaagacagcgcccatgcaggtgctgttttccggtgaggccacccaccgcaagtactattccaccacccacggtgctctgctgtccggccagcgtgaggctgcccgcctcattgagatgtaccgagacctcttccagcaggggacctga

SEQ ID NO: 288 - protein, 555 aa, Homo sapiens [sequence omitted]

SEQ ID NO: 289 - DNA, 5979 bp, Homo sapiens
  D28476
atgtccaaccggcctaataacaatccaggggggtcactgcgacgttcacagaggaacactgccggggcccaaccacaagacgactcaataggaggaagaagctgcagttcatcatctgctgtgatagttccacaaccagaggatccagacagagccaatacttcagaaagacaaaaaacggggcaggtgcctaagaaagacaattctcgaggagtgaagcgcagtgctagtccagactacaacaggaccaattctcctagctctgcaaaaaaaccaaaagcacttcagcatactgaatctccctcagaaacaaataagccacatagtaagtcaaagaagagacatttagaccaggagcaacaactgaaatctgcacaatcaccatcaacaagcaaggctcataccaggaagagtggggccactggcggttcacggagtcagaaaagaaaaaggacagagagttcttgtgtaaagagtggctccgggtctgaatcaactggtgcagaagagagatctgcgaaacctaccaagctggcttcaaaatcagccacctcagccaaagctgggtgtagcaccatcactgattcttcttctgctgcctctacttcctcctcgtcttctgctgtagcctcggcctcctccactgtaccaccaggtgccagagtgaaacaaggaaaagatcagaacaaggccaggcgttcccgttcagcgtccagtcccagccccagaagaagtagcagggaaaaggaacagagtaaaactggtggctcttcaaaatttgattgggctgctcgtttcagccctaaagttagccttcctaaaacaaaactgtctcttccagggtcttctaagtcagagacatcaaaacctggaccttctggattacaggccaaattagcaagtttaagaaaatctacgaagaaacgcagtgagtctccacctgctgagctccccagtttgaggcggagcacacgccaaaagaccacgggctcctgtgctagtaccagtcggcgaggctctggcctgggcaaaagaggagcagctgaagctcgtcgacaggagaaaatggcagaccctgaaagcaaccaggaggcagtaaattcttcagctgctcggacagatgaagctccccaaggagctgcaggggctgttggcatgaccacctctggggagagtgaatcagatgattccgagatgggacgtttgcaagctttgttagaggcaaggggtcttccccctcacctatttggtcctcttggtcctcggatgtcacagcttttccatagaacaattggaagtggagctagttctaaggcccagcagctactacaaggattgcaagccagtgatgaaagtcaacagcttcaggcagttattgagatgtgtcagttactggtcatgggaaatgaggagacactgggagggtttcctgtcaagagtgttgttccagctttgattacgttacttcagatggagcacaattttgatattatgaaccatgcttgtcgagccttaacatacatgatggaagcacttcctcgatcttctgctgttgtagtagatgctattcctgtctttttagaaaagctgcaagttattcagtgtattgatgtggcagagcaggccttgactgccttggagatgttgtcacggagacatagtaaagccattctacaggcgggtggtttggcagactgcttgctgtacctagaattcttcagcataaatgcccaaagaaatgcattagcaattgcagctaattgctgccagagtatcacgccagatgaatttcattttgtggcagattcactcccattgctaacccaaaggctaacacatcaggataaaaagtcagtagaaagcacttgcctttgttttgcacgcctagtggacaacttccagcatgaggagaatttactccagcaggttgcttccaaagatctgcttacaaatgttcaacagctgttggtagtgactccacccattttaagttctgggatgtttataatggtggttcgcatgttttctctgatgtgttccaactgtccaactttagctgttcaacttatgaaacaaaacattgcagaaacgcttcactttctcctgtgtggtgcctccaatggaagttgtcaggaacagattgatcttgttccacgaagccctcaagagttgtatgaactgacatctctgatttgtgaacttatgccatgtttaccaaaagaaggcatttttgcagttgataccatgttgaagaagggaaatgcacagaacacagatggtgcgatatggcagtggcgtgatgatcggggcctctggcatccatataacaggattgacagccggatcattgagcaaatcaatgaggacacgggaacagcacgtgccattcagagaaaacctaacccgttagccaatagtaacactagtggatattcagagtcaaagaaggatgatgctcgagcacagcttatgaaagaggatccggaactggctaagtcttttattaagacattatttggtgttctttatgaagtgtatagttcctcagcaggacctgcggtcagacataagtgccttagagcaattcttaggataatttattttgcggatgctgaacttctgaaggatgttctgaaaaatcatgctgtttcaagtcacattgcttccatgctgtcaagccaagacctgaagatagtagtgggagcacttcagatggcagaaattttaatgcagaagttacctgatatttttagtgtttacttcagaagagaaggtgtaatgcatcaagtaaaacacttagcagaatcagagtctttgttgacaagtccaccaaaggcatgtacgaatggatcgggatccatgggatccacaacttcagtcagcagtgggacagccacagctgccactcatgctgcagctgacttgggatcacccagcttgcagcacagcagggatgattctttagatctcagccctcaaggtcgattaagtgatgttctaaagagaaaacgactgccaaaacgagggccaagaaggccaaagtactcacctccaagagatgatgacaaagtagacaatcaagctaaaagccccaccactactcagtcacctaaatcttctttcctggcaagcttgaatccaaaaacatggggaaggttaagtacacagtccaacagcaacaacattgagccagcacggactgcgggaggtagtggccttgccagggctgcctcaaaggataccatctccaataatagagaaaaaattaaaggttggattaaggagcaggcacataaatttgtagaacgttatttcagttctgagaatatggatggaagcaaccctgcattgaatgtccttcagagactttgtgctgcaaccgaacaactcaacctccaggtggatggtggagctgagtgccttgtagaaatccgtagcatagtctcagagtcagatgtttcatcatttgaaatccaacatagtggatttgtgaagcagctgttgctttatttgacatctaaaagtgaaaaggatgctgtgagcagagagatcagattaaagcgatttcttcatgtatttttttcttctccacttcctggagaagagcccattggaagagtggaaccagtgggtaatgcacctttgttggcattagttcacaagatgaacaactgcctcagccagatggaacaatttccagtcaaagtacatgatttccctagtggaaatgggacaggaggcagcttttctctcaacagaggatcacaggctttaaaatttttcaacacacatcaattaaaatgccagttacaaaggcatccagactgtgcaaatgtgaagcagtggaagggtggacctgtcaagattgaccctctggctttggtacaagccatcgagagataccttgtagttagagggtatggaagagtaagagaagatgatgaagacagcgatgacgatggatcagatgaggaaatagatgagtctctggctgctcagttcctaaattcaggaaatgtaagacacaggctgcagttttatattggagaacatttgctgccgtataacatgactgtgtatcaggcagtacggcagtttagtatacaggctgaagatgaaagagaatccacagatgatgagagcaatcctctaggcagagctggtatttggacaaagactcatacaatatggtataaacctgtgagagaggatgaagaaagtaataaagattgtgttggtggtaaaagaggaagagcccaaacagctccaacgaaaacttcccctagaaatgcaaaaaagcatgatgagttatggcacgatggagtgtgcccatcagtatcaaatcctttagaagtttacctcattcccacaccacctgaaaatataacatttgaagacccgtcattagatgtgatccttcttttaagagttttacatgctatcagtcgatactggtattacttgtatgataatgcaatgtgcaaggaaattattccaactagtgaatttattaacagtaagttaacagcaaaagcaaataggcaacttcaagatcctttagtaatcatgacaggaaacatcccaacatggcttactgagctaggaaaaacctgcccatttttctttccttttgatacccggcaaatgcttttttatgtaactgcatttgatcgggaccgagcaatgcaaagattacttgataccaacccagaaatcaaccagtctgattctcaagatagcagagttgcacctagattggatagaaaaaaacgtactgtgaaccgagaggagctgctgaaacaggcggagtctgtgatgcaggacctcggcagctcacgggccatgttagaaatccagtatgaaaatgaggttggtacaggtcttgggcctacactggagttttatgcgcttgtatctcaggaactacagagagctgacttgggtctttggagaggtgaagaagtaactcttagcaatccaaaagggagccaagaagggaccaagtatattcaaaacctccagggcctgtttgcgcttccctttggtaggacagcaaagccagctcatatcgcaaaggttaagatgaagtttcgcttcttaggaaaattaatggccaaggctatcatggatttcagattggtggaccttccccttggcttacccttttataaatggatgctacggcaagaaacttcactgacatcacacgatttgtttgacatcgacccagttgtagccagatcagtttatcacctagaagacattgtcagacagaagaaaagacttgaacaagataaatcccagaccaaagagagtctacagtatgcattagaaaccttgactatgaatggctgctcagttgaagatctaggactggatttcactctgccagggtttcccaatatcgaactgaagaaaggagggaaggatataccagtcactatccacaatttagaggagtatctaagactggttatattctgggcactaaatgaaggcgtttctaggcaatttgattcgttcagagatggatttgaatcagtcttcccactcagtcatcttcagtacttctacccggaggaactggatcagctcctttgtggcagtaaagcagacacttgggatgcaaagacactgatggaatgctgtaggcctgatcatggttatactcatgacagtcgggctgtgaagtttttgtttgagattctcagtagttttgataatgagcagcagaggttatttctccagtttgtgactggtagcccaagattgcctgttggaggattccggagtttgaatccacctttgacaattgtccgaaagacgtttgaatcaacagaaaacccagatgacttcttgccctctgtaatgacttgtgtgaactatcttaagttgccggactattcaagcattgagataatgcgtgaaaaactgttgatagcagcaagagaagggcagcagtcgttccatctttcctga

SEQ ID NO: 290 - protein, 1992 aa, Homo sapiens
  Q14669
MSNRPNNNPGGSLRRSQRNTAGAQPQDDSIGGRSCSSSSAVIVPQPEDPDRANTSERQKTGQVPKKDNSRGVKRSASPDYNRTNSPSSAKKPKALQHTESPSETNKPHSKSKKRHLDQEQQLKSAQSPSTSKAHTRKSGATGGSRSQKRKRTESSCVKSGSGSESTGAEERSAKPTKLASKSATSAKAGCSTITDSSSAASTSSSSSAVASASSTVPPGARVKQGKDQNKARRSRSASSPSPRRSSREKEQSKTGGSSKFDWAARFSPKVSLPKTKLSLPGSSKSETSKPGPSGLQAKLASLRKSTKKRSESPPAELPSLRRSTRQKTTGSCASTSRRGSGLGKRGAAEARRQEKMADPESNQEAVNSSAARTDEAPQGAAGAVGMTTSGESESDDSEMGRLQALLEARGLPPHLFGPLGPRMSQLFHRTIGSGASSKAQQLLQGLQASDESQQLQAVIEMCQLLVMGNEETLGGFPVKSVVPALITLLQMEHNFDIMNHACRALTYMMEALPRSSAVVVDAIPVFLEKLQVIQCIDVAEQALTALEMLSRRHSKAILQAGGLADCLLYLEFFSINAQRNALAIAANCCQSITPDEFHFVADSLPLLTQRLTHQDKKSVESTCLCFARLVDNFQHEENLLQQVASKDLLTNVQQLLVVTPPILSSGMFIMVVRMFSLMCSNCPTLAVQLMKQNIAETLHFLLCGASNGSCQEQIDLVPRSPQELYELTSLICELMPCLPKEGIFAVDTMLKKGNAQNTDGAIWQWRDDRGLWHPYNRIDSRIIEQINEDTGTARAIQRKPNPLANSNTSGYSESKKDDARAQLMKEDPELAKSFIKTLFGVLYEVYSSSAGPAVRHKCLRAILRIIYFADAELLKDVLKNHAVSSHIASMLSSQDLKIVVGALQMAEILMQKLPDIFSVYFRREGVMHQVKHLAESESLLTSPPKACTNGSGSMGSTTSVSSGTATAATHAAADLGSPSLQHSRDDSLDLSPQGRLSDVLKRKRLPKRGPRRPKYSPPRDDDKVDNQAKSPTTTQSPKSSFLASLNPKTWGRLSTQSNSNNIEPARTAGGSGLARAASKDTISNNREKIKGWIKEQAHKFVERYFSSENMDGSNPALNVLQRLCAATEQLNLQVDGGAECLVEIRSIVSESDVSSFEIQHSGFVKQLLLYLTSKSEKDAVSREIRLKRFLHVFFSSPLPGEEPIGRVEPVGNAPLLALVHKMNNCLSQMEQFPVKVHDFPSGNGTGGSFSLNRGSQALKFFNTHQLKCQLQRHPDCANVKQWKGGPVKIDPLALVQAIERYLVVRGYGRVREDDEDSDDDGSDEEIDESLAAQFLNSGNVRHRLQFYIGEHLLPYNMTVYQAVRQFSIQAEDERESTDDESNPLGRAGIWTKTHTIWYKPVREDEESNKDCVGGKRGRAQTAPTKTSPRNAKKHDELWHDGVCPSVSNPLEVYLIPTPPENITFEDPSLDVILLLRVLHAISRYWYYLYDNAMCKEIIPTSEFINSKLTAKANRQLQDPLVIMTGNIPTWLTELGKTCPFFFPFDTRQMLFYVTAFDRDRAMQRLLDTNPEINQSDSQDSRVAPRLDRKKRTVNREELLKQAESVMQDLGSSRAMLEIQYENEVGTGLGPTLEFYALVSQELQRADLGLWRGEEVTLSNPKGSQEGTKYIQNLQGLFALPFGRTAKPAHIAKVKMKFRFLGKLMAKAIMDFRLVDLPLGLPFYKWMLRQETSLTSHDLFDIDPVVARSVYHLEDIVRQKKRLEQDKSQTKESLQYALETLTMNGCSVEDLGLDFTLPGFPNIELKKGGKDIPVTIHNLEEYLRLVIFWALNEGVSRQFDSFRDGFESVFPLSHLQYFYPEELDQLLCGSKADTWDAKTLMECCRPDHGYTHDSRAVKFLFEILSSFDNEQQRLFLQFVTGSPRLPVGGFRSLNPPLTIVRKTFESTENPDDFLPSVMTCVNYLKLPDYSSIEIMREKLLIAAREGQQSFHLS

SEQ ID NO: 291 - DNA, 2199 bp, Homo sapiens
  X63282
atgtctcgaaggaagatttcgtccgagtccttcagctccctgggctccgactacctggagaccagcccggaggaggagggggagtgccccctgtctaggctctgctggaatggcagccggagcccgcccgggccgctggagcccagcccggccgcagctgccgctgccgccgccccggccccgaccccggctgcttctgccgccgccgccgctgccactgccggggccaggagggtgcagcgccggaggcgggtcaacctggactcgctgggcgagagcatcagccgcctgacggcgccctcgcctcagacgatacagcagactctcaagaggacactgcagtattatgaacatcaagttattggttacagggatgcagaaaagaatttccacaatatctctaacagatgctcctatgcagaccactccaacaaagaagaaattgaagatgtctcaggaattcttcagtgtactgctaatatactcggtttgaagtttgaggaaattcaaaaaagatttggtgaagagttctttaatatatgctttcatgagaatgagagagtccttcgagctgtaggtggcactttgcaggacttttttaacggctttgatgctttgttggaacacattagaacttcttttggaaaacaggccactctggagtcaccatctttcctatgcaaagagctccctgaaggtactctcatgctccactacttccaccctcaccatattgtggggtttgcaatgctggggatgattaaggctgcaggaaagaagatctatcggctggatgtggaagtggaacaggttgcaaatgagaagctatgctctgatgtttcaaacccaggcaattgtagctgtcttactttccttatcaaagaatgtgaaaatactaatatcatgaagaaccttccacagggaacctcccaagttcctgcggacctcagaattagcatcaacaccttctgtagagccttccctttccacttgatgtttgatcccagcatgtcagtccttcagttgggggaaggtctaaggaagcagcttcgatgtgacactcacaaagtgctcaagtttgaggactgcttcgagattgtatctccaaaggttaatgccacctttgaaagggtcctgctgcgactgtctaccccgtttgtgattagaaccaagcctgaggcttctggctctgaaaataaagacaaggtgatggaagtcaaaggacaaatgatccatgttccagaatcaaattccattttatttttgggctctccatgtgtggacaagttggatgaactcatgggccgagggctacatctctcagacatccctatccatgatgccacccgagatgtcattttggttggtgagcaggcaaaggcccaagatgggttgaagaaaaggatggataaattaaaggcaactttagaaagaactcaccaggccctggaagaagagaaaaagaagacagtggatcttctatattctattttccctggtgatgtagcccagcaattatggcaagggcagcaagtacaggccagaaagtttgatgatgtcaccatgctcttttcagacattgttggcttcacagccatatgtgcccagtgtactcccatgcaagtaatcagcatgctgaatgaactgtacaccagatttgaccaccagtgtggatttttggatatttataaggtggaaacaataggtgatgcctactgtgttgcagcagggctccacagaaaaagcctctgccatgctaaacccattgctctgatggccttgaagatgatggaactttcagaagaggtgctgacacctgatggaagaccgattcagatgaggataggaattcactcaggctccgtgctggctggagttgttggggtgcgaatgccacgttattgcctgtttggaaataatgtcacactggcaagcaaattcgagtcgggaagtcaccctcggcgcatcaatgtcagcccaaccacttaccaattattaaaacgagaagaaagtttcacattcattccgcggtctcgtgaagagcttccagacaactttccaaaggaaattcctgggatctgctatttcctggaggtaaggactggtccaaagccaccaaagccttctctttcttcgtcgagaataaaaaaggtttcctacaacatcggcaccatgttcctccgggagacaagcctctga

SEQ ID NO: 292 - protein, 732 aa, Homo sapiens
  P33402
MSRRKISSESFSSLGSDYLETSPEEEGECPLSRLCWNGSRSPPGPLEPSPAAAAAAAAPAPTPAASAAAAAATAGARRVQRRRRVNLDSLGESISRLTAPSPQTIQQTLKRTLQYYEHQVIGYRDAEKNFHNISNRCSYADHSNKEEIEDVSGILQCTANILGLKFEEIQKRFGEEFFNICFHENERVLRAVGGTLQDFFNGFDALLEHIRTSFGKQATLESPSFLCKELPEGTLMLHYFHPHHIVGFAMLGMIKAAGKKIYRLDVEVEQVANEKLCSDVSNPGNCSCLTFLIKECENTNIMKNLPQGTSQVPADLRISINTFCRAFPFHLMFDPSMSVLQLGEGLRKQLRCDTHKVLKFEDCFEIVSPKVNATFERVLLRLSTPFVIRTKPEASGSENKDKVMEVKGQMIHVPESNSILFLGSPCVDKLDELMGRGLHLSDIPIHDATRDVILVGEQAKAQDGLKKRMDKLKATLERTHQALEEEKKKTVDLLYSIFPGDVAQQLWQGQQVQARKFDDVTMLFSDIVGFTAICAQCTPMQVISMLNELYTRFDHQCGFLDIYKVETIGDAYCVAAGLHRKSLCHAKPIALMALKMMELSEEVLTPDGRPIQMRIGIHSGSVLAGVVGVRMPRYCLFGNNVTLASKFESGSHPRRINVSPTTYQLLKREESFTFIPRSREELPDNFPKEIPGICYFLEVRTGPKPPKPSLSSSRIKKVSYNIGTMFLRETSL

SEQ ID NO: 293 - DNA, 1212 bp, Homo sapiens
  AL096881
atgagcggcagagtcggcgatctgagccccaggcagaaggaggcattggccaagtttcgggagaatgtccaggatgtgctgccggccctgccgaatccagatgactattttctcctgcgttggctccgagccagaagcttcgacctgcagaagtcggaggccatgctccggaagcatgtggagttccgaaagcaaaaggacattgacaacatcattagctggcagcctccagaggtgatccaacagtatctgtcagggggtatgtgtggctatgacctggatggctgcccagtctggtacgacataattggacctctggatgccaagggtctgctgttctcagcctccaaacaggacctgctgaggaccaagatgcgggagtgtgagctgcttctgcaagagtgtgcccaccagaccacaaagttggggaggaaggtggagaccatcaccataatttatgactgcgaggggcttggcctcaagcatctctggaagcctgctgtggaggcctatggagagtttctctgcatgtttgaggaaaattatcccgaaacactgaagcgtctttttgttgttaaagcccccaaactgtttcctgtggcctataacctcatcaaacccttcctgagtgaggacactcgtaagaagatcatggtcctgggagcaaattggaaggaggttttactgaaacatatcagccctgaccaggtgcctgtggagtatgggggcaccatgactgaccctgatggaaaccccaagtgcaaatccaagatcaactacgggggtgacatccccaggaagtattatgtgcgagaccaggtgaaacagcagtatgaacacagcgtgcagatttcccgtggctcctcccaccaagtggagtatgagatcctcttccctggctgtgtcctcaggtggcagtttatgtcagatggagcggatgttggttttgggattttcctgaagaccaagatgggagagaggcagcgggcaggggagatgacagaggtgctgcccaaccagaggtacaactcccacctggtccctgaagatgggaccctcacctgcagtgatcctggcatctatgtcctgcggtttgacaacacctacagcttcattcatgccaagaaggtcaatttcactgtggaggtcctgcttccagacaaagcctcagaagagaagatgaaacagctgggggcaggcaccccgaaataa

SEQ ID NO: 294 - protein, 403 aa, Homo sapiens
  O76054
MSGRVGDLSPRQKEALAKFRENVQDVLPALPNPDDYFLLRWLRARSFDLQKSEAMLRKHVEFRKQKDIDNIISWQPPEVIQQYLSGGMCGYDLDGCPVWYDIIGPLDAKGLLFSASKQDLLRTKMRECELLLQECAHQTTKLGRKVETITIIYDCEGLGLKHLWKPAVEAYGEFLCMFEENYPETLKRLFVVKAPKLFPVAYNLIKPFLSEDTRKKIMVLGANWKEVLLKHISPDQVPVEYGGTMTDPDGNPKCKSKINYGGDIPRKYYVRDQVKQQYEHSVQISRGSSHQVEYEILFPGCVLRWQFMSDGADVGFGIFLKTKMGERQRAGEMTEVLPNQRYNSHLVPEDGTLTCSDPGIYVLRFDNTYSFIHAKKVNFTVEVLLPDKASEEKMKQLGAGTPK

SEQ ID NO: 295 - DNA, 2888 bp, Homo sapiens
  BC033918
atggcgtcaaactcaactaagtctttcctggcagatgccggctatggcgaacaggaactggatgccaactctgcccttatggaattggacaaaggcctaagatctggcaaacttggtgaacagtgtgaagcagttgttcgctttcccagactttttcagaagtatccattccctattcttatcaattctgcattcctaaagttagctgatgttttcagagttggaaataatttcctgaggctatgtgttcttaaagttacccaacaaagtgagaaacatttggagaagattctaaatgtggatgaatttgtgaagagaattttttctgtgattcatagtaatgatcctgtggcaagagccatcaccctccggatgttgggaagtctggcatcaataattcctgagaggaagaatgctcatcatagtattcgtcagagtttagattcacatgataatgtagaagttgaagctgctgtttttgctgctgcaaacttctctgcacagtcaaaggattttgctgtaggaatctgtaacaaaatcagtgaaatgattcaaggtttagcgacaccagtagacttgaagctaaaattgatacccattctacagcacatgcaccatgatgcaatcttggcttccagtgctcgtcagcttttacaacagctggtcacatcctatccgtccaccaaaatggtgattgtgtctttgcacactttcactctgcttgcagcgtcatctttggttgatacacctaagcagattcagcttctgttgcagtatttgaagaatgatcccaggaaggcagtaaagagacttgctattcaagatctgaaattacttgctaataaaacaccacatacttggagtagggagaatattcaggcactttgtgagtgtgccctccagactccttatgacagcttaaaactagggatgttgtctgtcctttccacactatcagggaccatcgccatcaaacattacttcagtatagttccaggaaatgtgagttcttctcccagatcttctgatttagtcaaattagcccaagagtgctgttaccataataacaggggcattgcagctcatggagttagagtcctaactaatataactgtttcttgtcaagaaaaggatcttttggcactggaacaagatgctgtctttggcctggaatccctactggtactttgtagtcaagatgatagtccaggtgctcaggccactttaaagattgctctaaactgtatggtgaagttggccaagggcaggccccgtcttagccagtcagtagttgagaccttgttgactcaattgcacagtgctcaagacgctgcccggattttgatgtgccattgcctggcagccattgccatgcaactgccggtgctgggtgatgggatgcttggtgacctcatggagctgtacaaggtgattggacgatcagccacagacaagcaacaagaacttctggtgagtttggctactgtgatttttgttgcaagtcagaaggcattgtctgtggaaagtaaggcagtaattaagcagcagcttgaaagtgtctccaatggatggactgtataccgtattgccagacaggcttccagaatgggtaatcatgacatggccaaagagctttatcagagtttgctgactcaggttgcctcagaacatttctacttctggctaaatagtttgaaggagttttcacatgcagaacagtgtctcactgggttgcaagaggaaaattatagttcagcactttcttgcattgctgaatctttaaaattctatcacaaagggattgcttccttaacagcagctagtacaccactgaatcctttaagctttcagtgtgaatttgtaaaactcaggattgaccttttacaagccttctctcaacttatctgtacttgtaatagcctgaagacaagcccaccacctgcaattgccacaacaattgccatgaccttaggaaatgacctccagaggtgtggtcgcatctccaatcagatgaaacagtccatggaagaatttcgaagccttgcttctcgatatggagatctttaccaggcatcttttgatgctgactcagcaactttgaggaatgttgaactacagcagcagagctgtttactgatatctcatgcaatagaagccctgattttggatccagaatcagcaagtttccaggaatatggatctactggaacagcccatgctgatagtgaatatgaaagaagaatgatgtctgtatataatcatgtcttggaggaggtagaatcactcaatcggaaatatacccctgtttcttatatgcacacagcatgcctctgcaatgccatcattgctttgctgaaagttcccctttctttccagagatattttttccagaaactacagtctaccagcatcaagcttgctctgtcaccatcgccccggaatcctgcagagcccattgctgtccagaataaccagcagctggcgctaaaggtagagggagtggttcagcacggatctaaaccaggactcttccgcaaaattcagtctgtctgtctgaatgtttcttccacactgcagagtaaatctggacaagactacaagatacccattgacaacatgaccaatgagatggagcaaagggttgaacctcataatgattacttcagtactcaatttctgttgaactttgctatccttggaacacacaacattacagtggaatcttctgtgaaagatgccaatggtatagtatggaagactggtcccagaactaccatatttgtaaaatccctggaagacccttattcccagcaaattcgcttacaacagcagcaagcccagcagccattacagcagcagcagcaacgcaatgcctacacacggtttta

SEQ ID NO: 296 - protein, 962 aa, Homo sapiens
  Q8N4K7; AAH33918
MASNSTKSFLADAGYGEQELDANSALMELDKGLRSGKLGEQCEAVVRFPRLFQKYPFPILINSAFLKLADVFRVGNNFLRLCVLKVTQQSEKHLEKILNVDEFVKRIFSVIHSNDPVARAITLRMLGSLASIIPERKNAHHSIRQSLDSHDNVEVEAAVFAAANFSAQSKDFAVGICNKISEMIQGLATPVDLKLKLIPILQHMHHDAILASSARQLLQQLVTSYPSTKMVIVSLHTFTLLAASSLVDTPKQIQLLLQYLKNDPRKAVKRLAIQDLKLLANKTPHTWSRENIQALCECALQTPYDSLKLGMLSVLSTLSGTIAIKHYFSIVPGNVSSSPRSSDLVKLAQECCYHNNRGIAAHGVRVLTNITVSCQEKDLLALEQDAVFGLESLLVLCSQDDSPGAQATLKIALNCMVKLAKGRPRLSQSVVETLLTQLHSAQDAARILMCHCLAAIAMQLPVLGDGMLGDLMELYKVIGRSATDKQQELLVSLATVIFVASQKALSVESKAVIKQQLESVSNGWTVYRIARQASRMGNHDMAKELYQSLLTQVASEHFYFWLNSLKEFSHAEQCLTGLQEENYSSALSCIAESLKFYHKGIASLTAASTPLNPLSFQCEFVKLRIDLLQAFSQLICTCNSLKTSPPPAIATTIAMTLGNDLQRCGRISNQMKQSMEEFRSLASRYGDLYQASFDADSATLRNVELQQQSCLLISHAIEALILDPESASFQEYGSTGTAHADSEYERRMMSVYNHVLEEVESLNRKYTPVSYMHTACLCNAIIALLKVPLSFQRYFFQKLQSTSIKLALSPSPRNPAEPIAVQNNQQLALKVEGVVQHGSKPGLFRKIQSVCLNVSSTLQSKSGQDYKIPIDNMTNEMEQRVEPHNDYFSTQFLLNFAILGTHNITVESSVKDANGIVWKTGPRTTIFVKSLEDPYSQQIRLQQQQAQQPLQQQQQRNAYTRF

SEQ ID NO: 297 - DNA, 4328 bp, Homo sapiens
  AB002366
agctaatcaatgaatacaaagaggaccctaaactactgtcaatggcatattcagctgttggaaaactctccagtcggatgccacatttattcactaaggatatagcgcttgtgcagcagctttttgaagccctttgcaaggaagagcctgagactcgacttgctattcaagaagctttatctatgatggttggagcgtatagtactttggaaggggcacagcgaactctcatggaggcacttgtggcttcgtacttaataaagcctgaagttcaagttcgacaagtggctgtgaaatttgccagtacggtgtttccctcagatcatatcccttccagatatttgctgctactggctgcaggagatccacgtgaagaagttcatggagaagcacaacgcgtattaaggtgtcttccaggtagaaacagaaaagaaagtacttctgagcagatgccttccttcccagaaatggtttattacatccaagaaaaggcttctcatcgaatgaaaactccagtcaagtacatgaccgggaccactgtccttccatttaacccagcagcctttggagagatcgttctgtacttgcgcatgtgccttgcgcacagtgcgggggtggtgcccacctctcagagtttggctgatatgcaggatcatgccccagccattgggcgctacatacggactttaatgtcaagcgggcagatggcaccctcatcatctaacaagagtggggagactaaccctgtccagatctacattggcctgcttcagcagctgttagcaggtgttggaggtttgccggttatgtactgtctattggaagctgtgtcagtgtatccagaaaagctggctaccaaatttgtagacaaaacagaatggataaagagtctgatgaataacagtaaagaagaaatgcgcgaactggcagcgttgttttattctgtagtggtatcaacagtgtcggggaatgagttgaaatcaatgatagaacagcttataaagactacaaaagacaatcacagcccggagatacagcatggatccttgcttgcattgggattcacggtgggaaggtatttggctaaaaagaaaatgagaatgtcagagcaacaagacctggagagaaatgctgacaccctccctgatcaagaggaactcattcagagtgctacagaaacaataggctcatttttggacagtacatcacccctcctggcaattgctgcctgcacagccctgggtgaaattggcagaaatggtccacttccaatccccagtgagggatctggctttaccaaattgcatcttgtagaaagcttactaagtagaataccttccagtaaagaaacaaataagatgaaagaacgagcaatccaaacactgggatattttccagttggggatggagattttcctcaccagaaactcctcttgcaaggtctgatggattctgtggaggccaagcagatagaacttcagttcactattggcgaagccattaccagtgctgcaataggaactagttctgtggctgcccgagatgcctggcaaatgactgaagaggaatatactccacctgctggagccaaagtgaatgatgtggttccatgggtgttggatgtgattttaaataaacatatcatcagccccaacccacacgtgaggcaagcagcctgcatctggctcctttcccttgtcaggaagctaagtacccacaaagaagtgaagtctcatcttaaagaaattcaaagtgcatttgtttcagttctatcagaaaatgatgaacttagccaagatgttgcatcaaagggccttgggttggtttatgaactaggcaatgaacaagatcaacaggaattggtttctacacttgtggaaacacttatgactggcaaaagagttaaacatgaagtttctggagagacagtggtatttcaagggggagctcttggcaaaacaccagatggtcagggcctttctacttacaaggaactttgttctctggcaagtgatcttagccagccagatctggtgtataaatttatgaatttagccaaccatcatgcaatgtggaactctaggaagggtgctgcttttggttttaatgtaattgctaccagagctggagagcagctggctccttttctgcctcagctagttcctcgactttatcgttaccagtttgatcccaaccttggcattcgacaggccatgacaagtatttggaatgcgttggtcactgacaaatccatggtggataaatatttgaaagaaattcttcaagatttggttaagaaccttacaagcaatatgtggcgagttcgagaatccagctgtttagctttgaatgatttattgagaggaagacccttagatgacatcattgataaacttccagaaatttgggaaacgctttttagagtacaagatgatatcaaggaatctgtacgaaaagcggcagaactagctctgaaaactctgagcaaggtctgtgtgaaaatgtgtgaccctgccaaaggagcagctggccagagaaccatcgctgcccttctgccttgccttctggacaaaggaatgatgagcaccgtgacggaagttcgagccctcagcattaacacccttgtgaagatcagcaaaagtgcaggagccatgttgaaaccgcatgcaccaaaactcattccagctctgctagagtccttaagtgtattggagccccaagttctcaattatttgagcctccgggcgacagagcaagaaaaggctgcgatggatagtgctcggcttagtgctgccaaatcttctccaatgatggaaacaatcaacatgtgcctgcaataccttgatgtgtcagtgctgggcgagctagttcctaggttgtgtgaactgatcagaagtggtgtaggtcttggaactaagggtggctgtgccagtgtcattgtgtcattaactactcagtgtcctcaggacctaacaccttactcaggtaaacttatgagtgctttgctgagtggcctgacagatcggaacagtgtgattcagaaatcttgtgcatttgctatgggccatttagttcggacctcacgggatagcagcactgaaaaactcctgcagaagctcaatgggtggtatatggagaaagaagaacctatctacaagacctcttgtgctttgactattcatgctattggacgatacagccctgatgtattaaagaatcatgcaaaagaagtcctgcctctggcatttttaggcatgcatgaaattgctgatgaggagaaatccgaaaaagaagaatgtaatttatggaccgaagtgtggcaggaaaacgtacctggatcctttggtggcattcgattatacctgcaggagttaattactattacccagaaggctttgcagtctcagtcctggaaaatgaaagcccagggtgcaattgccatggcatcaattgcaaaacagactagctctctagtacctccatatctcggaatgatactgaccgcattgctgcaaggcctggctggaagaacgtgggcaggaaaggaggagctattgaaagccattgcctgtgtggtgacagcttgcagtgcagagctggaaaagtctgtgcccaatcaacccagcacaaatgaaattcttcaagctgttctgaaggaatgtagcaaagagaatgtcaaatacaagattgtagcaatcagctgtgcagctgatatcttgaaggccaccaaagaggacagattccaggagttctctaacattgtcatacctctcatcaagaagaactcacttgaaagcagtggggtccggacaaccaaaaatgaagaggagaatgaaaaggaaaaggagctccagctggaatatctgctgggtgcctttgaaagcctgggcaaagcctggccgcgaaacgcggagacccaacgttgttatcgtcaggagctgtgcaaactgatgtgtgaacggctaaaactcagcacgtggaaagtgcagctaggagtcctgcaatcaatgaatgccttttttcaggggttaatgcttttggaagaagaacatgccgatcctgaggctttggctgaaattctgcttgaaacttgtaaatcaatcacatattctttagaaaataagacctactcatctgtgagaacagaagctttatctgtgatagaattgctgcttaaaaaacttgaagaatctaaacagtgggaatgtttgacatctgaatgcagagtgctcctaattgagtctttagctactatggagccagacagcagacctgaactgcaggagaaagcagcgttactgaagaaaacacttgaaaatctggaataa

SEQ ID NO: 298 - protein, 1441 aa, Homo sapiens
  O15074
LINEYKEDPKLLSMAYSAVGKLSSRMPHLFTKDIALVQQLFEALCKEEPETRLAIQEALSMMVGAYSTLEGAQRTLMEALVASYLIKPEVQVRQVAVKFASTVFPSDHIPSRYLLLLAAGDPREEVHGEAQRVLRCLPGRNRKESTSEQMPSFPEMVYYIQEKASHRMKTPVKYMTGTTVLPFNPAAFGEIVLYLRMCLAHSAGVVPTSQSLADMQDHAPAIGRYIRTLMSSGQMAPSSSNKSGETNPVQIYIGLLQQLLAGVGGLPVMYCLLEAVSVYPEKLATKFVDKTEWIKSLMNNSKEEMRELAALFYSVVVSTVSGNELKSMIEQLIKTTKDNHSPEIQHGSLLALGFTVGRYLAKKKMRMSEQQDLERNADTLPDQEELIQSATETIGSFLDSTSPLLAIAACTALGEIGRNGPLPIPSEGSGFTKLHLVESLLSRIPSSKETNKMKERAIQTLGYFPVGDGDFPHQKLLLQGLMDSVEAKQIELQFTIGEAITSAAIGTSSVAARDAWQMTEEEYTPPAGAKVNDVVPWVLDVILNKHIISPNPHVRQAACIWLLSLVRKLSTHKEVKSHLKEIQSAFVSVLSENDELSQDVASKGLGLVYELGNEQDQQELVSTLVETLMTGKRVKHEVSGETVVFQGGALGKTPDGQGLSTYKELCSLASDLSQPDLVYKFMNLANHHAMWNSRKGAAFGFNVIATRAGEQLAPFLPQLVPRLYRYQFDPNLGIRQAMTSIWNALVTDKSMVDKYLKEILQDLVKNLTSNMWRVRESSCLALNDLLRGRPLDDIIDKLPEIWETLFRVQDDIKESVRKAAELALKTLSKVCVKMCDPAKGAAGQRTIAALLPCLLDKGMMSTVTEVRALSINTLVKISKSAGAMLKPHAPKLIPALLESLSVLEPQVLNYLSLRATEQEKAAMDSARLSAAKSSPMMETINMCLQYLDVSVLGELVPRLCELIRSGVGLGTKGGCASVIVSLTTQCPQDLTPYSGKLMSALLSGLTDRNSVIQKSCAFAMGHLVRTSRDSSTEKLLQKLNGWYMEKEEPIYKTSCALTIHAIGRYSPDVLKNHAKEVLPLAFLGMHEIADEEKSEKEECNLWTEVWQENVPGSFGGIRLYLQELITITQKALQSQSWKMKAQGAIAMASIAKQTSSLVPPYLGMILTALLQGLAGRTWAGKEELLKAIACVVTACSAELEKSVPNQPSTNEILQAVLKECSKENVKYKIVAISCAADILKATKEDRFQEFSNIVIPLIKKNSLESSGVRTTKNEEENEKEKELQLEYLLGAFESLGKAWPRNAETQRCYRQELCKLMCERLKLSTWKVQLGVLQSMNAFFQGLMLLEEEHADPEALAEILLETCKSITYSLENKTYSSVRTEALSVIELLLKKLEESKQWECLTSECRVLLIESLATMEPDSRPELQEKAALLKKTLENLE

SEQ ID NO: 299 - DNA, 2664 bp, Homo sapiens
  AB028983
ggagcctaccataagcacctcatggaactcgctcttcagcaaacatatcaggacacctgtaattgcatcaagtcgcggatcaagttggaatttgaaaaacgtcaacaggagcggcttctgctctccctgctgccggcccacatcgccatggagatgaaagcggagatcatccagaggctgcagggccccaaggcgggccagatggagaacacaaataacttccacaacctgtatgtgaagcggcatacaaacgtgagcatcttatacgctgacatcgttggctttacccggctggcaagtgactgctccccgggagaactagtccacatgctgaatgagctctttggaaagtttgatcaaattgcaaaggagaatgaatgcatgagaattaaaattttaggagactgctactactgtgtatctggactccctatatctctccctaaccatgccaagaactgtgtgaaaatggggctggacatgtgtgaagccataaagaaagtgagggatgctactggagttgatatcaacatgcgcgtgggcgtgcattctgggaatgtcctgtgtggcgtgattggtctgcagaagtggcaatatgatgtgtggtcacatgatgtgaccttggccaaccacatggaagctggaggggtccctggacgtgttcacatttcttctgtcaccctggagcacttgaatggcgcttataaagtggaggagggagatggtgacattagggacccatatttaaaacagcacctggtgaaaacctactttgtgatcaaccccaagggagaacgacggagcccccagcatctcttcagacctcgccacacccttgatggagccaaaatgagggcctcggtccgcatgacccggtacttggagtcctggggggcagccaagccctttgcacacctacatcacagggacagcatgaccacagagaacggcaagatcagcaccacggatgtacccatgggtcagcataattttcaaaatcgcaccttaagaaccaagtcacaaaagaagagatttgaagaagaattgaatgaaaggatgattcaagcaattgatgggattaatgcacagaagcaatggctcaagtctgaagacattcagagaatctcactgcttttctataacaaagtactagaaaaagagtaccgggccacggcactgccagcgttcaagtattatgtgacttgtgcctgtctcatattcttctgcatcttcattgtgcagattctcgtgctgccaaaaacgtctgtcctgggcatctcctttggggctgcgtttctcttgctggccttcatcctcttcgtctgctttgctggacagcttctgcaatgcagcaaaaaagcctctcccctgctcatgtggcttttgaagtcctcgggcatcattgccaaccgcccctggccacggatctctctcacgatcatcaccacagccatcatattaatgatggccgtgttcaacatgtttttcctgagtgactcagaggaaacaatccctccaactgccaacacaacaaacacaagcttttcagcctcaaataatcaggtggcgattctgcgtgcgcagaatttatttttcctcccgtactttatctacagctgcattctgggactgatatcctgttccgtgttcctgcgggtaaactatgagctgaagatgttgatcatgatggtggccttggtgggctacaacaccatcctactccacacccacgcccacgtcctgggcgactacagccaggtcttatttgagagaccaggcatttggaaagacctgaagaccatgggctctgtgtctctctctatattcttcatcacactgcttgttctgggtagacagaatgaatattactgtaggttagacttcttatggaagaacaaattcaaaaaagagcgggaggagatagagaccatggagaacctgaaccgcgtgctgctggagaacgtgcttcccgcgcacgtggctgagcacttcctggccaggagcctgaagaatgaggagctataccaccagtcctatgactgcgtctgtgtcatgtttgcctccattccggatttcaaagaattttatacagaatccgacgtgaacaaggagggcttggaatgccttcggctcctgaacgagatcatcgctgactttgatgatcttctttccaagccaaaattcagtggagttgaaaagattaagaccattggcagcacatacatggcagcaacaggtctgagcgctgtgcccagccaggagcactcccaggagcccgagcggcagtacatgcacattggcaccatggtggagtttgcttttgccctggtagggaagctggatgccatcaacaagcactccttcaacgacttcaaattgcgagtgggtattaaccatggacctgtgatagctggtgtgattggagctcagaagccacaatatgatatctggggcaacactgtcaatgtggccagtaggatggacagcaccggagtcctggacaaaatacaggttaccgaggagacgagcctcgtcctgcagaccctcggatacacgtgcacctgtcgaggaataatcaacgtgaaaggaaagggggacctgaagacgtactttgtaaacacagaaatgtcaaggtccctttcccagagcaacgtggcatcctga

SEQ ID NO: 300 - protein, 887 aa, Homo sapiens; identical to SEQ ID NO: 234
  Q08462

SEQ ID NO: 301 - DNA, 3243 bp, Homo sapiens
  D25538
atgccagccaaggggcgctacttcctcaacgagggcgaggagggccctgaccaagatgcgctctacgagaagtaccagctcaccagccagcatgggccgctgctgctcacgctcctgctggtggccgccactgcctgcgtggccctcatcatcattgccttcagccagggggacccctccagacaccaggccattctgggcatggcgttcctggtgctggcggtgtttgcggccctctctgtgctgatgtacgtcgagtgtctcctgcggcgctggctcagggccttggcgctgctcacctgggcctgcttggtggcgctgggctatgtgctggtgttcgacgcatggacaaaggcggcctgtgcgtgggagcaggtgcccttcttcctgttcattgtcttcgtggtgtacacactactgcccttcagcatgcggggcgctgtcgccgttggggccgtctccactgcctcccacctcctggtgctcggttctttgatgggaggcttcacgacacccagtgtccgggtggggctgcagctgctggccaacgcagtcatcttcctgtgtgggaacctgacaggcgccttccacaagcaccaaatgcaggatgcgtcccgggacctcttcacctacactgtgaagtgcatccagatccgccggaagctgcgcatcgagaagcgccagcaggagaacctgctgctgtcagtgcttccggcccacatctccatgggcatgaagctggccatcatcgaacggctcaaggagcatggtgaccgtcgctgcatgcctgacaacaacttccacagcctctacgtcaagaggcaccagaatgtcagcatcctctatgcggacatcgtgggcttcacgcagctggccagcgactgttctcccaaggagctggtggtggtgctgaatgagctctttggcaagttcgaccagatcgccaaggccaacgagtgcatgcgaatcaagatcctcggcgactgctactactgtgtatcgggcctgcccgtgtcgctgcctacccacgcccggaactgcgtgaagatggggctggacatgtgccaggccatcaagcaggtgcgggaggccacgggcgtggacatcaacatgcgtgtgggcatacactcggggaatgtgctgtgcggggtcatcgggctgcgcaagtggcagtatgacgtgtggtcccacgacgtgtccctggccaaccggatggaggcagccggagtacccggccgggtgcacatcacggaggccacgctaaagcacctggacaaggcgtacgaggtggaggatgggcacgggcagcagcgggacccctacctcaaggagatgaacatccgcacctacctggtcatcgacccccggagccagcagccacccccgcccagccaacacctccccaggcccaagggggacgcggccctgaagatgcgggcgtcagtgcgcatgacccggtacctcgagtcctggggggcggcacggccctttgcacatctcaaccaccgtgagagcgtgagcagtggtgagacccacgtccccaacgggcggaggcctaagagcgttccccagcgccaccgccggaccccagacagaagcatgtcccccaaggggcggtcggaggatgactcgtacgatgacgagatgctgtcagccattgaggggctcagctccacgaggccctgctgctccaagtccgatgacttctacacctttgggtccatcttcctggagaagggctttgagcgcgagtaccgcctggcacccatcccccgggcccgccacgactttgcctgcgccagcctgatcttcgtctgcatcctgctcgtccatgtcctgctcatgcccaggacggcggcactgggtgtgtccttcgggctggtggcctgtgtactggggctggtgctgggcctgtgctttgccaccaagttctcgaggtgctgcccagctcgggggacgctctgcactatctctgagagggtggagacacagcccctgctgaggctgaccctggccgtcctgaccatcggcagcctgctcactgtggccatcatcaacctgcccctgatgcctttccaagttccagagctgcctgttggcaatgagacaggcctactggccgcgagcagcaagacaagagccctgtgtgagcccctcccgtactacacctgcagctgtgtcctgggcttcatcgcctgctcggtcttcctgaggatgagcctggagccaaaggttgtgctgctgacagtggccctggtggcctacctggtgctcttcaacctctccccatgctggcagtgggactgctgcggccaaggcctgggcaacctcaccaagcccaacggcaccaccagtggcacccctagctgttcctggaaggacctgaagaccatgaccaatttctacctggtcctgttctacatcaccctgcttacactctccagacagattgactattactgccgcttggactgcctatggaagaagaagttcaagaaggagcacgaggagtttgagaccatggagaacgtgaaccgccttcttctggagaacgtcctgccagcccacgtggctgcccactttatcggtgacaagttaaacgaggactggtaccatcagtcctatgactgcgtctgtgtcatgtttgcctccgtgccggacttcaaagtgttctacacagagtgcgatgtcaacaaagaagggctggagtgcctacgcctgctcaatgagatcattgccgacttcgacgagctcctactgaagcccaagttcagcggcgtggagaagatcaagaccatcggcagcacgtacatggcagctgcagggctcagcgtcgcctcagggcacgagaaccaggagctggagcggcagcatgcccacattggtgtcatggtggagttcagcatcgccctgatgagtaagctggacggcatcaacaggcactccttcaactccttccgcctccgcgtcggcataaaccatgggcctgtgattgctggagtgattggggcccgaaaacctcagtatgacatctggggaaacactgtcaatgtggccagccgaatggaaagcactggagaacttgggaaaatccaggttaccgaggagacctgcaccatcctccagggcctcgggtactcttgtgaatgccgtggcctgatcaacgtcaaaggcaaaggcgagctgaggacttactttgtctgtacggacactgccaagtttcaggggctggggctgaactga

SEQ ID NO: 302 - protein, 1080 aa, Homo sapiens; identical to SEQ ID NO: 248
  P51828

SEQ ID NO: 303 - DNA, 969 bp, Homo sapiens
  AJ404857
atggcggcgtctggggaaccccagaggcagtggcaagaggaggtggcggcggtggtagtggtgggctcctgcatgaccgacctggtcagtcttacttctcgtttgccaaaaactggagaaaccatccatggacataagttttttattggctttggagggaaaggtgccaaccagtgtgtccaagctgctcggcttggagcaatgacgtccatggtgtgtaaggttggcaaagattcttttggcaatgattatatagaaaacttaaaacagaatgatatttctacagaatttacatatcagactaaagatgctgctacaggaactgcttctataattgtcaataatgaaggccagaatatcattgtcatagtggctggagcaaatttacttttgaatacggaggatctgagggcagcagccaatgtcattagcagagccaaagtcatggtctgccagctcgaaataactccagcaacttctttggaagccctaacaatggcccgcaggagtggagtgaaaaccttgttcaatccagcccctgccattgctgacctggatccccagttctacaccctctcagatgtgttctgctgcaatgaaagtgaggctgagattttaactggcctcacggtgggcagcgctgcagatgctggggaggctgcattagtgctcttgaaaaggggctgccaggtggtaatcattaccttaggggctgaaggatgtgtggtgctgtcacagacagaacctgagccaaagcacattcccacagagaaagtcaaggctgtggataccacgggtgctggtgacagctttgtgggagctctggccttctacctggcttactatccaaatctgtccttggaagacatgctcaacagatccaatttcattgcagcagtcagtgtccaggctgcaggaacacagtcatcttacccttacaaaaaagaccttccgcttactctgttttga

SEQ ID NO: 304 - protein, 322 aa, Homo sapiens [sequence omitted]

SEQ ID NO: 305 - DNA, 1509 bp, Homo sapiens
  D89675
atgcttttgcgaagtgcaggaaaattaaatgtgggcaccaagaaagaggatggtgagagtacagcccccaccccccgtccaaaggtcttgcgttgtaaatgccaccaccattgtccagaagactcagtcaacaatatttgcagcacagacggatattgtttcacgatgatagaagaggatgactctgggttgcctgtggtcacttctggttgcctaggactagaaggctcagattttcagtgtcgggacactcccattcctcatcaaagaagatcaattgaatgctgcacagaaaggaacgaatgtaataaagacctacaccctacactgcctccattgaaaaacagagattttgttgatggacctatacaccacagggctttacttatatctgtgactgtctgtagtttgctcttggtccttatcatattattttgttacttccggtataaaagacaagaaaccagacctcgatacagcattgggttagaacaggatgaaacttacattcctcctggagaatccctgagagacttaattgagcagtctcagagctcaggaagtggatcaggcctccctctgctggtccaaaggactatagctaagcagattcagatggtgaaacagattggaaaaggtcgctatggggaagtttggatgggaaagtggcgtggcgaaaaggtagctgtgaaagtgttcttcaccacagaggaagccagctggttcagagagacagaaatatatcagacagtgttgatgaggcatgaaaacattttgggtttcattgctgcagatatcaaagggacagggtcctggacccagttgtacctaatcacagactatcatgaaaatggttccctttatgattatctgaagtccaccaccctagacgctaaatcaatgctgaagttagcctactcttctgtcagtggcttatgtcatttacacacagaaatctttagtactcaaggcaaaccagcaattgcccatcgagatctgaaaagtaaaaacattctggtgaagaaaaatggaacttgctgtattgctgacctgggcctggctgttaaatttattagtgatacaaatgaagttgacataccacctaacactcgagttggcaccaaacgctatatgcctccagaagtgttggacgagagcttgaacagaaatcacttccagtcttacatcatggctgacatgtatagttttggcctcatcctttgggaggttgctaggagatgtgtatcaggaggtatagtggaagaataccagcttccttatcatgacctagtgcccagtgacccctcttatgaggacatgagggagattgtgtgcatcaagaagttacgcccctcattcccaaaccggtggagcagtgatgagtgtctaaggcagatgggaaaactcatgacagaatgctgggctcacaatcctgcatcaaggctgacagccctgcgggttaagaaaacacttgccaaaatgtcagagtcccaggacattaaactctga

SEQ ID NO: 306 - protein, 502 aa, Homo sapiens
  O00238
MLLRSAGKLNVGTKKEDGESTAPTPRPKVLRCKCHHHCPEDSVNNICSTDGYCFTMIEEDDSGLPVVTSGCLGLEGSDFQCRDTPIPHQRRSIECCTERNECNKDLHPTLPPLKNRDFVDGPIHHRALLISVTVCSLLLVLIILFCYFRYKRQETRPRYSIGLEQDETYIPPGESLRDLIEQSQSSGSGSGLPLLVQRTIAKQIQMVKQIGKGRYGEVWMGKWRGEKVAVKVFFTTEEASWFRETEIYQTVLMRHENILGFIAADIKGTGSWTQLYLITDYHENGSLYDYLKSTTLDAKSMLKLAYSSVSGLCHLHTEIFSTQGKPAIAHRDLKSKNILVKKNGTCCIADLGLAVKFISDTNEVDIPPNTRVGTKRYMPPEVLDESLNRNHFQSYIMADMYSFGLILWEVARRCVSGGIVEEYQLPYHDLVPSDPSYEDMREIVCIKKLRPSFPNRWSSDECLRQMGKLMTECWAHNPASRLTALRVKKTLAKMSESQDIKL

SEQ ID NO: 307 - DNA, 1599 bp, Homo sapiens
  Z22535
atgactcagctatacatttacatcagattattgggagcctatttgttcatcatttctcgtgttcaaggacagaatctggatagtatgcttcatggcactgggatgaaatcagactccgaccagaaaaagtcagaaaatggagtaaccttagcaccagaggataccttgccttttttaaagtgctattgctcagggcactgtccagatgatgctattaataacacatgcataactaatggacattgctttgccatcatagaagaagatgaccagggagaaaccacattagcttcagggtgtatgaaatatgaaggatctgattttcagtgcaaagattctccaaaagcccagctacgccggacaatagaatgttgtcggaccaatttatgtaaccagtatttgcaacccacactgccccctgttgtcataggtccgttttttgatggcagcattcgatggctggttttgctcatttctatggctgtctgcataattgctatgatcatcttctccagctgcttttgttacaaacattattgcaagagcatctcaagcagacgtcgttacaatcgtgatttggaacaggatgaagcatttattccagttggagaatcactaaaagaccttattgaccagtcacaaagttctggtagtgggtctggactacctttattggttcagcgaactattgccaaacagattcagatggtccggcaagttggtaaaggccgatatggagaagtatggatgggcaaatggcgtggcgaaaaagtggcggtgaaagtattctttaccactgaagaagccagctggtttcgagaaacagaaatctaccaaactgtgctaatgcgccatgaaaacatacttggtttcatagcggcagacattaaaggtacaggttcctggactcagctctatttgattactgattaccatgaaaatggatctctctatgacttcctgaaatgtgctacactggacaccagagccctgcttaaattggcttattcagctgcctgtggtctgtgccacctgcacacagaaatttatggcacccaaggaaagcccgcaattgctcatcgagacctaaagagcaaaaacatcctcatcaagaaaaatgggagttgctgcattgctgacctgggccttgctgttaaattcaacagtgacacaaatgaagttgatgtgcccttgaataccagggtgggcaccaaacgctacatggctcccgaagtgctggacgaaagcctgaacaaaaaccacttccagccctacatcatggctgacatctacagcttcggcctaatcatttgggagatggctcgtcgttgtatcacaggagggatcgtggaagaataccaattgccatattacaacatggtaccgagtgatccgtcatacgaagatatgcgtgaggttgtgtgtgtcaaacgtttgcggccaattgtgtctaatcggtggaacagtgatgaatgtctacgagcagttttgaagctaatgtcagaatgctgggcccacaatccagcctccagactcacagcattgagaattaagaagacgcttgccaagatggttgaatcccaagatgtaaaaatctga

SEQ ID NO: 308 - protein, 532 aa, Homo sapiens
  P36894
MTQLYIYIRLLGAYLFIISRVQGQNLDSMLHGTGMKSDSDQKKSENGVTLAPEDTLPFLKCYCSGHCPDDAINNTCITNGHCFAIIEEDDQGETTLASGCMKYEGSDFQCKDSPKAQLRRTIECCRTNLCNQYLQPTLPPVVIGPFFDGSIRWLVLLISMAVCIIAMIIFSSCFCYKHYCKSISSRRRYNRDLEQDEAFIPVGESLKDLIDQSQSSGSGSGLPLLVQRTIAKQIQMVRQVGKGRYGEVWMGKWRGEKVAVKVFFTTEEASWFRETEIYQTVLMRHENILGFIAADIKGTGSWTQLYLITDYHENGSLYDFLKCATLDTRALLKLAYSAACGLCHLHTEIYGTQGKPAIAHRDLKSKNILIKKNGSCCIADLGLAVKFNSDTNEVDVPLNTRVGTKRYMAPEVLDESLNKNHFQPYIMADIYSFGLIIWEMARRCITGGIVEEYQLPYYNMVPSDPSYEDMREVVCVKRLRPIVSNRWNSDECLRAVLKLMSECWAHNPASRLTALRIKKTLAKMVESQDVKI

SEQ ID NO: 309 - DNA, 1530 bp, Homo sapiens
  L02911
atggtagatggagtgatgattcttcctgtgcttatcatgattgctctcccctcccctagtatggaagatgagaagcccaaggtcaaccccaaactctacatgtgtgtgtgtgaaggtctctcctgcggtaatgaggaccactgtgaaggccagcagtgcttttcctcactgagcatcaacgatggcttccacgtctaccagaaaggctgcttccaggtttatgagcagggaaagatgacctgtaagaccccgccgtcccctggccaagccgtggagtgctgccaaggggactggtgtaacaggaacatcacggcccagctgcccactaaaggaaaatccttccctggaacacagaatttccacttggaggttggcctcattattctctctgtagtgttcgcagtatgtcttttagcctgcctgctgggagttgctctccgaaaatttaaaaggcgcaaccaagaacgcctcaatccccgagacgtggagtatggcactatcgaagggctcatcaccaccaatgttggagacagcactttagcagatttattggatcattcgtgtacatcaggaagtggctctggtcttccttttctggtacaaagaacagtggctcgccagattacactgttggagtgtgtcgggaaaggcaggtatggtgaggtgtggaggggcagctggcaaggggaaaatgttgccgtgaagatcttctcctcccgtgatgagaagtcatggttcagggaaacggaattgtacaacactgtgatgctgaggcatgaaaatatcttaggtttcattgcttcagacatgacatcaagacactccagtacccagctgtggttaattacacattatcatgaaatgggatcgttgtacgactatcttcagcttactactctggatacagttagctgccttcgaatagtgctgtccatagctagtggtcttgcacatttgcacatagagatatttgggacccaagggaaaccagccattgcccatcgagatttaaagagcaaaaatattctggttaagaagaatggacagtgttgcatagcagatttgggcctggcagtcatgcattcccagagcaccaatcagcttgatgtggggaacaatccccgtgtgggcaccaagcgctacatggcccccgaagttctagatgaaaccatccaggtggattgtttcgattcttataaaagggtcgatatttgggcctttggacttgttttgtgggaagtggccaggcggatggtgagcaatggtatagtggaggattacaagccaccgttctacgatgtggttcccaatgacccaagttttgaagatatgaggaaggtagtctgtgtggatcaacaaaggccaaacatacccaacagatggttctcagacccgacattaacctctctggccaagctaatgaaagaatgctggtatcaaaatccatccgcaagactcacagcactgcgtatcaaaaagactttgaccaaaattgataattccctcgacaaattgaaaactgactgttga

SEQ ID NO: 310 - protein, 509 aa, Homo sapiens
  Q04771
MVDGVMILPVLIMIALPSPSMEDEKPKVNPKLYMCVCEGLSCGNEDHCEGQQCFSSLSINDGFHVYQKGCFQVYEQGKMTCKTPPSPGQAVECCQGDWCNRNITAQLPTKGKSFPGTQNFHLEVGLIILSVVFAVCLLACLLGVALRKFKRRNQERLNPRDVEYGTIEGLITTNVGDSTLADLLDHSCTSGSGSGLPFLVQRTVARQITLLECVGKGRYGEVWRGSWQGENVAVKIFSSRDEKSWFRETELYNTVMLRHENILGFIASDMTSRHSSTQLWLITHYHEMGSLYDYLQLTTLDTVSCLRIVLSIASGLAHLHIEIFGTQGKPAIAHRDLKSKNILVKKNGQCCIADLGLAVMHSQSTNQLDVGNNPRVGTKRYMAPEVLDETIQVDCFDSYKRVDIWAFGLVLWEVARRMVSNGIVEDYKPPFYDVVPNDPSFEDMRKVVCVDQQRPNIPNRWFSDPTLTSLAKLMKECWYQNPSARLTALRIKKTLTKIDNSLDKLKTDC

SEQ ID NO: 311 - DNA, 1821 bp, Homo sapiens
  S59184
atgcgtggggcggcgcggctggggcggccgggccggagttgcctcccggggcccgcgctgagggccgccgccgcgcccgccctgctgcttgctcgttgcgctgttgccgctgctgccggcctgcgtgccgccgcccgtccgcggcccccggagctgcagtcggcttccgcggggcccagcgtgagtctctacctgagcgaggacgaggtgcgccggctgatcggtcttgatgcagaactttattatgtgagaaatgaccttattagtcactacgctctatcctttaatctgttagtacccagtgagacaaatttcctgcacttcacctggcatgcgaagtccaaggttgaatataagctgggattccaagtggacaatgttttggcaatggatatgccccaggtcaacatttctgttcagggggaagttccacgcactttatcagtgtttcgggtagagctttcctgtactggcaaagtagattctgaagttatgatactaatgcagctcaacttgacagtaaattcttcaaaaaattttaccgtcttaaattttaaacgaaggaaaatgtgctacaaaaaacttgaagaagtaaaaacttcagccttggacaaaaacactagcagaactatttatgatcctgtacatgcagctccaaccacttctacgcgtgtgttttatattagtgtaggggtttgttgtgcagtaatatttctcgtagcaataatattagctgttttgcaccttcataatatgaaaaggattgaactggatgacagcattagtgccagcagtagttcccaagggctgtctcagccatccacccagacgactcagtatctgagagcagacacgcccaacaatgcaactcctatcaccagttatcctaccttgcggatagagaagaacgacttgagaagtgtcactcttttggaggccaaaggcaaggtgaaggatatagcaatatccagagagaggataactctaaaagatgtactccaagaaggtacttttgggcgtattttccatgggattttaatagatgaaaaagatccaaataaagaaaaacaagcatttgtcaaaacagttaaagatcaagcttctgaaattcaggtgacaatgatgctcactgaaagttgtaagctgcgaggtcttcatcacagaaatcttcttcctattactcatgtgtgtatagaagaaggagaaaagcccatggtgatattgccttacatgaattgggggaatcttaaattgtttttacgacagtgcaagttagtagaggccaataatccacaggcaatttctcagcaagacctggtacacatggctattcagattgcctgtggaatgagctacctggccagaagggaagtcatccacaaagacctggctgccaggaactgtgtcattgatgacacacttcaagttaagatcacagacaatgccctctccagagacttgttccccatggactatcactgtctgggggacaatgaaaacaggccagttcgttggatggctcttgaaagtctggttaataacgagttctctagcgctagtgatgtgtgggcctttggagtgaacagcttgtgggaactcatgactctgggccagactccctacacgttggacattgaccccttcgagatggcggcatacctgaaagatggttaccgaatagcccagccaatcacctgtcctgatgaattatttgctgtgatggcctgttgctgggccttagatccagaggagaggcccaggtttcagcagctggtacagtgcctaacagagtttcatgcagccctgggggcctacgtctga

SEQ ID NO: 312 - protein, 604 aa, Homo sapiens
  P34925
MRGAARLGRPGRSCLPGPALRAAAAPALLLARCAVAAAAGLRAAARPRPPELQSASAGPSVSLYLSEDEVRRLIGLDAELYYVRNDLISHYALSFNLLVPSETNFLHFTWHAKSKVEYKLGFQVDNVLAMDMPQVNISVQGEVPRTLSVFRVELSCTGKVDSEVMILMQLNLTVNSSKNFTVLNFKRRKMCYKKLEEVKTSALDKNTSRTIYDPVHAAPTTSTRVFYISVGVCCAVIFLVAIILAVLHLHNMKRIELDDSISASSSSQGLSQPSTQTTQYLRADTPNNATPITSYPTLRIEKNDLRSVTLLEAKGKVKDIAISRERITLKDVLQEGTFGRIFHGILIDEKDPNKEKQAFVKTVKDQASEIQVTMMLTESCKLRGLHHRNLLPITHVCIEEGEKPMVILPYMNWGNLKLFLRQCKLVEANNPQAISQQDLVHMAIQIACGMSYLARREVIHKDLAARNCVIDDTLQVKITDNALSRDLFPMDYHCLGDNENRPVRWMALESLVNNEFSSASDVWAFGVTLWELMTLGQTPYVDIDPFEMAAYLKDGYRIAQPINCPDELFAVMACCWALDPEERPKFQQLVQCLTEFHAALGAYV

SEQ ID NO: 313 - DNA, 2664 bp, Homo sapiens; identical to SEQ ID NO: 299
  AB028983

SEQ ID NO: 314 - protein, 887 aa, Homo sapiens; identical to SEQ ID NO: 234
  Q08462

SEQ ID NO: 315 - DNA, 3756 bp, Homo sapiens
  Z35309
atggagctctccgatgtgcgctgccttacaggcagcgaggaactctacaccatccacccgacgcccccggccggcgacggcaggagcgcctcccggccgcagcggctgctgtggcagacggcggtgcgacacatcacggagcagcgcttcattcacgggcaccggggaggcagcggcagcgggagtggaggctcgggcaaagcctcggaccctgcgggcggcggccccaaccaccacgcgccgcagctgtcaggcgactcggcgctgcccctctactcgctgggcccgggagagcgagcgcacagcacctgcggcaccaaagtcttcccggaacgcagcgggagcggcagtgccagcggcagcggaggcgggggcgacctgggcttcctgcaccttgactgtgcccctagcaactcggatttctttcttaatgggggctatagctaccgaggggtcattttccccaccctgcgcaactccttcaaatctcgggatttggaacgcctctaccagcgctatttcttgggccaaaggcgcaaatcggaagtggtgatgaacgtgctggacgtgctgaccaaactcactctcttggtcctacacttgagcctggcctcggcccccatggacccgctcaagggcatcctgctgggcttcttcaccggcattgaggtagtgatctgcgccctggtggtggtcaggaaggacaccacctcccacacgtacctgcagtacagcggcgtggtcacctgggtggccatgaccacccagatcctggcagcaggcctcggctacgggctcctgggcgacggcataggctacgtgctcttcacgctcttcgccacctacagtatgctgccgctgccgctcacctgggccatcctggccggcctgggcacctcgctgctgcaggtcatcctccaagtggtcataccccggctggcggtcatttccatcaaccaggttgtggcccaggcagtgctattcatgtgtatgaacacagctggaatcttcatcagttacctgtcagaccgggcccagcgccaagctttcctggagactcggaggtgtgtggaggccaggctgcgcctggagacagagaaccaaagacaggagcggctcgtgctttctgtgctcccccggtttgttgtcctggaaatgatcaacgacatgaccaatgtggaagatgagcacctgcagcaccagttccatcggatctacatccatcgctatgagaacgtcagtattctttttgcagatgttaaaggatttaccaacctctccacgaccttgtctgctcaggagctggtcaggatgctcaacgagctctttgccagatttgatcgactggcccatgagcatcactgccttcgtattaaaatcctgggggactgctactactgcgtgtctggacttcctgagccccgccaggaccatgcccactgctgtgttgaaatgggtctcagcatgatcaaaaccatcaggtatgtgcggtcaaggacaaaacacgatgttgacatgaggattggaatccactccggctcggtgctgtgcggtgttttgggactacggaagtggcagtttgatgtctggtcttgggatgtggatattgcaaacaaactcgaatctggaggaatccccgggaggattcacatttccaaagccacgctggactgtctcaacggtgactataacgtggaagagggccatggtaaagagaggaatgaattcctgaggaagcataatatcgaaacttacttaattaagcagcctgaggacagtctgctgtccttgcctgaagatatcgtcaaggagtcagtgagctcctcagaccggagaaacagtggggccacattcactgaaggatcctggagccctgaactgccctttgataatatcgtggggaaacagaatactctggctgccctaacaagaaattcaataaatctgcttccaaaccatcttgcacaagctttgcatgtccagtctgggcctgaggaaattaacaagagaatagaacataccatcgacttgcggagtggcgataaattgagaagagagcatatcaagccattctcactgatgtttaaagactccagcctggagcacaagtattctcaaatgagggatgaagtgttcaagtcaaacttggtctgtgcatttatcgttcttctatttatcacggcaatacaaagtttgcttccttcttcaagagtgatgccaatgaccatccagttctccattctgattatgctgcactcggctctggtcctcatcaccacagcagaggattataaatgtttgcccctcatcctccggaaaacttgctgttggattaatgagacctatttggcccggaacgtcatcatctttgcatccattttgattaatttcctgggtgccatcttaaatatcctgtggtgtgattttgacaagtcgatacccttgaagaacctgactttcaattcctcagctgtgtttacagatatctgctcctacccagagtactttgtcttcacgggggtgttggccatggtgacctgtgcagttttcctccggctgaactccgtcctgaagctggcagtgctgctgatcatgattgccatctatgccctgctcactgagaccgtctacgcaggcctctttctgcgttatgacaacctcaaccacagtggagaagatttcctggggaccaaggaggtatcactgctactgatggccatgttcctcctggctgtgttctaccatggacagcagctggagtacacagcccgcctggacttcctttggcgagtacaggccaaagaggagatcaatgagatgaaggagctgagggaacacaatgagaacatgctccggaatatcttacccagccatgtggcccgccatttcctagagaaggaccgagacaatgaggagctgtattctcaatcctatgatgctgttggggtgatgtttgcctccatcccaggatttgcggacttttactctcagactgaaatgaataaccagggagtggaatgcctgcgcttgctcaatgagatcattgctgacttcgatgagttgcttggtgaagaccgatttcaagacattgaaaagattaagaccattggcagcacctacatggccgtgtcaggcctgtcacctgaaaaacagcaatgtgaagacaagtggggacatttgtgtgctctggctgacttctcactcgccctgacagaaagcatacaggagatcaacaagcattcattcaacaattttgaactccggattggcatcagccacggctcagtggtagctggcgttatcggcgctaagaaaccacagtatgacatttggggcaaaactgtgaacctggcaagccgaatggacagcacgggggttagtggccggatccaagtcccagaggagacctatctcatcctgaaggaccagggctttgcctttgattaccgaggggagatctatgtgaagggtatcagtgaacaggaaggaaaaatcaaaacgtactttcttctgggaagagtccaacccaacccattcatcttgcccccaagaagactgcctgggcagtactccctggccgcggttgtcctgggacttgtccagtccctcaataggcaaaggcagaagcagctactcaatgagaacaacaacacaggaatcatcaagggtcattacaaccggcggactttgttgtcacccagcggcacagagcctggagcccaggctgaaggcaccgacaaatctgatttgccataa

SEQ ID NO: 316 - protein, 1251 aa, Homo sapiens; identical to SEQ ID NO: 236
  P40145

SEQ ID NO: 317 - DNA, 2907 bp, Homo sapiens
  D32050
atggactctactctaacagcaagtgaaatccggcagcgatttatagatttcttcaagaggaacgagcatacgtatgttcactcgtctgccaccatcccattggatgaccccactttgctctttgccaatgcaggcatgaaccagtttaaacccattttcctgaacacaattgacccatctcaccccatggcaaagctgagcagagctgccaatacccagaagtgcatccgggctgggggcaaacaaaatgacctggacgatgtgggcaaggatgtctatcatcacaccttcttcgagatgctgggctcttggtcttttggagattactttaaggaattggcatgtaagatggctctggaactcctcacccaagagtttggcattcccattgaaagactttatgttacttactttggcggggatgaagcagctggcttagaagcagatctggaatgcaaacagatctggcaaaatttggggctggatgacaccaaaatcctcccaggcaacatgaaggataacttctgggagatgggtgacacgggcccctgtggtccttgcagtgagatccactacgaccggattggtggtcgggacgccgcacatcttgtcaaccaggacgaccctaatgtgctggagatctggaaccttgtgttcatccagtataacagggaagctgatggcattctgaaacctcttcccaagaaaagcattgacacagggatgggcctggaacgactggtatctgtgctgcagaataagatgtccaactatgacactgacctttttgtcccttactttgaagccattcagaagggcacaggtgcccgaccatacactgggaaagttggtgctgaggatgccgatgggattgacatggcctaccgggtgctggctgaccatgctcggaccatcactgtggcactggctgatggtggccggcctgacaacacagggcgtggatatgtgttgagacggattctccgccgagctgtccgatacgcccatgaaaagctcaatgccagcaggggcttctttgctacgttagtggatgttgtcgtccagtccctgggagatgcatttcctgagctgaagaaggacccagacatggtgaaggacatcattaatgaagaagaggtgcagtttctcaagactctcagcagagggcgtcgcatcctggacaggaaaattcagagcctgggagacagcaagaccattcccggagacactgcttggctcctctatgacacctatgggtttccagtggatctgactggactgattgctgaagagaagggcctggtggtagacatggatggctttgaagaggagaggaaactggcccagctgaaatcacagggcaagggagctggtggggaagacctcattatgctggacatttacgctatcgaagagctccgggcacggggtctggaggtcacagatgattccccaaagtacaattaccatttggactccagtggtagctatgtatttgagaacacagtggctacggtgatggctctgcgcagggagaagatgttcgtggaagaggtgtccacaggccaggagtgtggagtggtgctggacaagacctgtttctatgctgagcaaggaggccagatctatgacgaaggctacctggtgaaggtggatgacagcagtgaagataaaacagagtttacagtgaagaatgctcaggtccgaggagggtatgtgctacacattggaaccatctacggtgacctgaaagtgggggatcaggtctggctgtttattgatgagccccgacgaagacccatcatgagcaaccacacagctacgcacattctgaacttcgccctgcgctcagtgcttggggaagctgaccagaaaggctcattggttgctcctgaccgcctcagatttgactttactgccaagggagccatgtccacccaacagatcaagaaggctgaagagattgctaatgagatgattgaggcagccaaggccgtctatacccaggattgccccctggcagcagcgaaagccatccagggcctacgggctgtgtttgatgagacctatcctgaccctgtgcgagtcgtctccattggggtcccggtgtccgagttgctggatgacccctctgggcctgctggctccctgacttctgttgagttctgtgggggaacgcacctgcggaactcgagtcatgcaggagcttttgtgatcgtgacggaagaagccattgccaagggtatccggaggattgtggctgtcacaggtgccgaggcccagaaggccctcaggaaagcagagagcttgaagaaatgtctctctgtcatggaagccaaagtgaaggctcagactgctccaaacaaggatgtgcagagggagatcgctgaccttggagaggccctggccactgcagtcatcccccagtggcagaaggatgaattgcgggagactctcaaatccctaaagaaggtcatggatgacttggaccgagccagcaaagccgatgtccagaaacgagtgttagagaagacgaagcagttcatcgacagcaaccccaaccagcctcttgtcatcctggagatggagagcggcgcctcagccaaggccctgaatgaagccttgaagctcttcaagatgcactcccctcagacttctgccatgctcttcacggtggacaatgaggctggcaagatcacgtgcctgtgtcaagtcccccagaatgcagccaatcggggcttaaaagccagcgagtgggtgcagcaggtgtcaggcttgatggacggtaaaggtggtggcaaggatgtgtctgcacaggccacaggcaagaacgttggctgcctgcaggaggcgctgcagctggccacttccttcgcccagctgcgcctcggggatgtaaagaactga

SEQ ID NO: 318 - protein, 968 aa, Homo sapiens
  P49588
MDSTLTASEIRQRFIDFFKRNEHTYVHSSATIPLDDPTLLFANAGMNQFKPIFLNTIDPSHPMAKLSRAANTQKCIRAGGKQNDLDDVGKDVYHHTFFEMLGSWSFGDYFKELACKMALELLTQEFGIPIERLYVTYFGGDEAAGLEADLECKQIWQNLGLDDTKILPGNMKDNFWEMGDTGPCGPCSEIHYDRIGGRDAAHLVNQDDPNVLEIWNLVFIQYNREADGILKPLPKKSIDTGMGLERLVSVLQNKMSNYDTDLFVPYFEAIQKGTGARPYTGKVGAEDADGIDMAYRVLADHARTITVALADGGRPDNTGRGYVLRRILRRAVRYAHEKLNASRGFFATLVDVVVQSLGDAFPELKKDPDMVKDIINEEEVQFLKTLSRGRRILDRKIQSLGDSKTIPGDTAWLLYDTYGFPVDLTGLIAEEKGLVVDMDGFEEERKLAQLKSQGKGAGGEDLIMLDIYAIEELRARGLEVTDDSPKYNYHLDSSGSYVFENTVATVMALRREKMFVEEVSTGQECGVVLDKTCFYAEQGGQIYDEGYLVKVDDSSEDKTEFTVKNAQVRGGYVLHIGTIYGDLKVGDQVWLFIDEPRRRPIMSNHTATHILNFALRSVLGEADQKGSLVAPDRLRFDFTAKGAMSTQQIKKAEEIANEMIEAAKAVYTQDCPLAAAKAIQGLRAVFDETYPDPVRVVSIGVPVSELLDDPSGPAGSLTSVEFCGGTHLRNSSHAGAFVIVTEEAIAKGIRRIVAVTGAEAQKALRKAESLKKCLSVMEAKVKAQTAPNKDVQREIADLGEALATAVIPQWQKDELRETLKSLKKVMDDLDRASKADVQKRVLEKTKQFIDSNPNQPLVILEMESGASAKALNEALKLFKMHSPQTSAMLFTVDNEAGKITCLCQVPQNAANRGLKASEWVQQVSGLMDGKGGGKDVSAQATGKNVGCLQEALQLATSFAQLRLGDVKN

SEQ ID NO: 319 - DNA, 5136 bp, Homo sapiens
  AF128625
atgtcggccaaggtgcggctcaagaagctggagcagctgctcctggacgggccctggcgcaacgagagcgccctgagcgtggaaacgctgctcgacgtgctcgtctgcctgtacaccgagtgcagccactcggccctgcgccgcgacaagtacgtggccgagttcctcgagtgggctaaaccatttacacagctggtgaaagaaatgcagcttcatcgagaagactttgaaataattaaagtaattggaagaggtgcttttggtgaggttgctgttgtcaaaatgaagaatactgaacgaatttatgcaatgaaaatcctcaacaagtgggagatgctgaaaagagcagagaccgcgtgcttccgagaggagcgcgatgtgctggtgaacggcgactgccagtggatcaccgcgctgcactacgcctttcaggacgagaaccacctgtacttagtcatggattactatgtgggtggtgatttactgaccctgctcagcaaatttgaagacaagcttccggaagatatggcgaggttctacattggtgaaatggtgctggccattgactccatccatcagcttcattacgtgcacagagacattaaacctgacaatgtccttttggacgtgaatggtcatatccgcctggctgactttggatcatgtttgaagatgaatgatgatggcactgtgcagtcctccgtggccgtgggcacacctgactacatctcgccggagatcctgcaggcgatggaggacggcatgggcaaatacgggcctgagtgtgactggtggtctctgggtgtctgcatgtatgagatgctctatggagaaacgccgttttatgcggagtcactcgtggagacctatgggaagatcatgaaccatgaagagcgattccagttcccatcccatgtcacggatgtatctgaagaagcgaaggacctcatccagagactgatctgcagtagagaacgccggctggggcagaatggaatagaggatttcaaaaagcatgcgttttttgaaggtctaaattgggaaaatatacgaaacctagaagcaccttatattcctgatgtgagcagtccctctgacacatccaacttcgacgtggatgacgacgtgctgagaaacacggaaatattacctcctggttctcacacaggcttttctggattacatttgccattcattggttttacattcacaacggaaagctgtttttctgatcgaggctctctgaagagcataatgcagtccaacacattaaccaaagatgaggatgtgcagcgggacctggagcacagcctgcagatggaagcttacgagaggaggattcggaggctggaacaggagaagctggagctgagcaggaagctgcaagagtccacccagaccgtgcagtccctccacggctcatctcgggccctcagcaattcaaaccgagataaagaaatcaaaaagctaaatgaagaaatcgaacgcttgaagaataaaatagcagattcaaacaggctggagcgacagcttgaggacacagtggcgcttcgccaagagcgtgaggactccacgcagcggctgcgggggctggagaagcagcaccgcgtggtccggcaggagaaggaggagctgcacaagcaactggttgaagcctcagagcggttgaaatcccaggccaaggaactcaaagatgcccatcagcagcgaaagctggccctgcaggagttctcggagctgaacgagcgcatggcagagctccgtgcccagaagcagaaggtgtcccggcagctgcgagacaaggaggaggagatggaggtggccacgcagaaggtggacgccatgcggcaggaaatgcggagagctgagaagctcaggaaagagctggaagctcagcttgatgatgctgttgctgaggcctccaaggagcgcaagcttcgtgagcacagcgagaacttctgcaagcaaatggaaagcgagctggaggccctcaaggtgaagcaaggaggccggggagcgggtgccaccttagagcaccagcaagagatttccaaaatcaaatccgagctggagaagaaagtcttattttatgaagaggaattggtcagacgtgaggcctcccatgtgctagaagtgaaaaatgtgaagaaggaggtgcatgattcagaaagccaccagctggccctgcagaaagaaatcttgatgttaaaagataagttagaaaagtcaaagcgagaacggcataacgagatggaggaggcagtaggtacaataaaagataaatacgaacgagaaagagcgatgctgtttgatgaaaacaagaagctaactgctgaaaatgaaaagctctgttcctttgtggataaactcacagctcaaaatagacagctggaggatgagctgcaggatctggcagccaagaaggagtcagtggcccactgggaagctcagattgcggaaatcattcagtgggtcagtgacgagaaagatgcccggggttaccttcaagctcttgcttccaagatgaccgaagagctcgaggctttgaggagttctagtctggggtcaagaacactggacccgctgtggaaggtgcgccgcagccagaagctggacatgtccgcgcggctggagctgcagtcggccctggaggcggagatccgggccaagcagcttgtccaggaggagctcaggaaggtcaaggacgccaacctcaccttggaaagcaaactaaaggattccgaagccaaaaacagagaattattagaagaaatggaaattttgaagaaaaagatggaagaaaaattcagagcagatactgggctcaaacttccagattttcaggattccatttttgagtatttcaacactgctcctcttgcacatgacctgacatttagaaccagctcagctagtgagcaagaaacacaagctccgaagccagaagcgtccccgtcgatgtctgtggctgcatcagagcagcaggaggacatggctcggcccccgcagaggccatccgctgtgccgttgcccaccacgcaggccctggttctggctggaccgaagccaaaagctcaccagttcagcatcaagtccttctccagccctactcagtgcagccactgcacctccctgatggttgggctgatccggcagggctacgcctgcgaggtgtgttcctttgcttgccacgtgtcctgcaaagacggtgccccccaggtgtgcccaatacctcccgagcagtccaagaggcctctgggcgtggacgtgcagcgaggcatcggaacagcctacaaaggccatgtcaaggtcccaaagcccacgggggtgaagaagggatggcagcgcgcatatgcagtcgtctgtgagtgcaagctcttcctgtatgatctgcctgaaggaaaatccacccagcctggtgtcattgcgagccaagtcttggatctcagagatgacgagttttccgtgagctcagtcctggcctcagatgtcattcatgctacacgccgagatattccatgtatattcagggtgacggcctctctcttaggtgcaccttctaagaccagctcgctgctcattctgacagaaaatgagaatgaaaagaggaagtgggttgggattctagaaggactccagtccatccttcataaaaaccggctgaggaatcaggtcgtgcatgttcccttggaagcctacgacagctcgctgcctctcatcaaggccatcctgacagctgccatcgtggatgcagacaggattgcagtcggcctagaagaagggctctatgtcatagaggtcacccgagatgtgatcgtccgtgccgctgactgtaagaaggtacaccagatcgagcttgctcccagggagaagatcgtaatcctcctctgtggccggaaccaccatgtgcacctctatccgtggtcgtcccttgatggagcggaaggcagctttgacatcaagcttccggaaaccaaaggctgccagctcatggccacggccacactcaagaggaactctggcacctgcctgtttgtggccgtgaaacggctgatcctttgctatgagatccagagaacgaagccattccacagaaagttcaatgagattgtggctcccggcagcgtgcagtgcctggcggtgctcagggacaggctctgtgtgggctacccttctgggttctgcctgctgagcatccagggggacgggcagcctctaaacctggtaaatcccaatgacccctcgcttgcgttcctctcacaacagtcttttgatgccctttgtgctgtggagctcgaaagcgaggagtacctgctttgcttcagccacatgggactgtacgtggacccgcaaggccggagggcacgcgcgcaggagctcatgtggcctgcggctcctgtcgcctgtagttgcagccccacccacgtcacggtgtacagcgagtatggcgtggacgtctttgatgtgcgcaccatggagtgggtgcagaccatcggcctgcggaggataaggcccctgaactctgaaggcaccctcaacctcctcaactgcgagcctccacgcttgatctacttcaagagcaagttctcgggagcggttctcaacgtgccggacacctccgacaacagcaagaagcagatgctgcgcaccaggagcaaaaggcggttcgtcttcaaggtcccagaggaagagagactgcagcagaggcgagagatgcttagagacccagaattgagatccaaaatgatatccaacccaaccaacttcaaccacgtggcccacatgggcccaggcgacggcatgcaggtgctcatggacctgcctctgagtgctgtgcccccctcccaggaggaaaggccgggccccgctcccaccaacctggctcgccagcctccatccaggaacaagccctacatctcgtggccctcatcaggtggatcggagcctagcgtgactgtgcctctgagaagtatgtctgatccagaccaggactttgacaaagagcctgattcggactccaccaaacactcaactccatcgaatagctccaaccccagcggcccaccgagccccaactccccccacaggagccagctccccctcgaaggcctggagcagccggcctgtgacacctga

SEQ ID NO: 320 - protein, 1711 aa, Homo sapiens [sequence omitted]

SEQ ID NO: 321 - DNA, 3186 bp, Homo sapiens
  X15357
atgccggggccccggcgccccgctggctcccgcctgcgcctgctcctgctcctgctgctgccgccgctgctgctgctgctccggggcagccacgcgggcaacctgacggtagccgtggtactgccgctggccaatacctcgtacccctggtcgtgggcgcgcgtgggacccgccgtggagctggccctggcccaggtgaaggcgcgccccgacttgctgccgggctggacggtccgcacggtgctgggcagcagcgaaaacgcgctgggcgtctgctccgacaccgcagcgcccctggccgcggtggacctcaagtgggagcacaaccccgctgtgttcctgggccccggctgcgtgtacgccgccgccccagtggggcgcttcaccgcgcactggcgggtcccgctgctgaccgccggcgccccggcgctgggcttcggtgtcaaggacgagtatgcgctgaccacccgcgcggggcccagctacgccaagctgggggacttcgtggcggcgctgcaccgacggctgggctgggagcgccaagcgctcatgctctacgcctaccggccgggtgacgaagagcactgcttcttcctcgtggaggggctgttcatgcgggtccgcgaccgcctcaatattacggtggaccacctggagttcgccgaggacgacctcagccactacaccaggctgctgcggaccatgccgcgcaaaggccgagttatctacatctgcagctcccctgatgccttcagaaccctcatgctcctggccctggaagctggcttgtgtggggaggactacgttttcttccacctggatatctttgggcaaagcctgcaaggtggacagggccctgctccccgcaggccctgggagagaggggatgggcaggatgtcagtgcccgccaggcctttcaggctgccaaaatcattacatataaagacccagataatcccgagtacttggaattcctgaagcagttaaaacacctggcctatgagcagttcaacttcaccatggaggatggcctggtgaacaccatcccagcatccttccacgacgggctcctgctctatatccaggcagtgacggagactctggcacatgggggaactgttactgatggggagaacatcactcagcggatgtggaaccgaagctttcaaggtgtgacaggatacctgaaaattgatagcagtggcgatcgggaaacagacttctccctctgggatatggatcccgagaatggtgccttcagggttgtactgaactacaatgggacttcccaagagctggtggctgtgtcggggcgcaaactgaactggcccctggggtaccctcctcctgacatccccaaatgtggctttgacaacgaagacccagcatgcaaccaagatcacctttccaccctggaggtgctggctttggtgggcagcctctccttgctcggcattctgattgtctccttcttcatatacaggaagatgcagctggagaaggaactggcctcggagctgtggcgggtgcgctgggaggacgttgagcccagtagccttgagaggcacctgcggagtgcaggcagccggctgaccctgagcgggagaggctccaattacggctccctgctaaccacagagggccagttccaagtctttgccaagacagcatattataagggcaacctcgtggctgtgaaacgtgtgaaccgtaaacgcattgagctgacacgaaaagtcctgtttgaactgaagcatatgcgggatgtgcagaatgaacacctgaccaggtttgtgggagcctgcaccgacccccccaatatctgcatcctcacagagtactgtccccgtgggagcctgcaggacattctggagaatgagagcatcaccctggactggatgttccggtactcactcaccaatgacatcgtcaagggcatgctgtttctacacaatggggctatctgttcccatgggaacctcaagtcatccaactgcgtggtagatgggcgctttgtgctcaagatcaccgactatgggctggagagcttcagggacctggacccagagcaaggacacaccgtttatgccaaaaagctgtggacggcccctgagctcctgcgaatggcttcaccccctgtgcggggctcccaggctggtgacgtatacagctttgggatcatccttcaggagattgccctgaggagtggggtcttccacgtggaaggtttggacctgagccccaaagagatcatcgagcgggtgactcggggtgagcagccccccttccggccctccctggccctgcagagtcacctggaggagttggggctgctcatgcagcggtgctgggctgaggacccacaggagaggccaccattccagcagatccgcctgacgttgcgcaaatttaacagggagaacagcagcaacatcctggacaacctgctgtcccgcatggagcagtacgcgaacaatctggaggaactggtggaggagcggacccaggcatacctggaggagaagcgcaaggctgaggccctgctctaccagatcctgcctcactcagtggctgagcagctgaagcgtggggagacggtgcaggccgaagcctttgacagtgttaccatctacttcagtgacattgtgggtttcacagcgctgtcggcggagagcacacccatgcaggtggtgaccctgctcaatgacctgtacacttgctttgatgctgtcatagacaactttgatgtgtacaaggtggagacaattggcgatgcctacatggtggtgtcagggctccctgtgcggaacgggcggctacacgcctgcgaggtagcccgcatggccctggcactgctggatgctgtgcgctccttccgaatccgccaccggccccaggagcagctgcgcttgcgcattggcatccacacaggacctgtgtgtgctggagtggtgggactgaagatgccccgttactgtctctttggggatacagtcaacacagcctcaagaatggagtctaatggggaagccctgaagatccacttgtcttctgagaccaaggctgtcctggaggagtttggtggtttcgagctggagcttcgaggggatgtagaaatgaagggcaaaggcaaggttcggacctactggctccttggggagagggggagtagcacccgaggctga

SEQ ID NO: 322 - protein, 1061 aa, Homo sapiens
  P16066
MPGPRRPAGSRLRLLLLLLLPPLLLLLRGSHAGNLTVAVVLPLANTSYPWSWARVGPAVELALAQVKARPDLLPGWTVRTVLGSSENALGVCSDTAAPLAAVDLKWEHNPAVFLGPGCVYAAAPVGRFTAHWRVPLLTAGAPALGFGVKDEYALTTRAGPSYAKLGDFVAALHRRLGWERQALMLYAYRPGDEEHCFFLVEGLFMRVRDRLNITVDHLEFAEDDLSHYTRLLRTMPRKGRVIYICSSPDAFRTLMLLALEAGLCGEDYVFFHLDIFGQSLQGGQGPAPRRPWERGDGQDVSARQAFQAAKIITYKDPDNPEYLEFLKQLKHLAYEQFNFTMEDGLVNTIPASFHDGLLLYIQAVTETLAHGGTVTDGENITQRMWNRSFQGVTGYLKIDSSGDRETDFSLWDMDPENGAFRVVLNYNGTSQELVAVSGRKLNWPLGYPPPDIPKCGFDNEDPACNQDHLSTLEVLALVGSLSLLGILIVSFFIYRKMQLEKELASELWRVRWEDVEPSSLERHLRSAGSRLTLSGRGSNYGSLLTTEGQFQVFAKTAYYKGNLVAVKRVNRKRIELTRKVLFELKHMRDVQNEHLTRFVGACTDPPNICILTEYCPRGSLQDILENESITLDWMFRYSLTNDIVKGMLFLHNGAICSHGNLKSSNCVVDGRFVLKITDYGLESFRDLDPEQGHTVYAKKLWTAPELLRMASPPVRGSQAGDVYSFGIILQEIALRSGVFHVEGLDLSPKEIIERVTRGEQPPFRPSLALQSHLEELGLLMQRCWAEDPQERPPFQQIRLTLRKFNRENSSNILDNLLSRMEQYANNLEELVEERTQAYLEEKRKAEALLYQILPHSVAEQLKRGETVQAEAFDSVTIYFSDIVGFTALSAESTPMQVVTLLNDLYTCFDAVIDNFDVYKVETIGDAYMVVSGLPVRNGRLHACEVARMALALLDAVRSFRIRHRPQEQLRLRIGIHTGPVCAGVVGLKMPRYCLFGDTVNTASRMESNGEALKIHLSSETKAVLEEFGGFELELRGDVEMKGKGKVRTYWLLGERGSSTRG

SEQ ID NO: 323 - DNA, 3144 bp, Homo sapiens
  AB005647
atggcgctgccatcacttctgctgttggtggcagccctggcaggtggggtgcgtcctcccggggcgcggaacctgacgctggcggtggtgctgccagaacacaacctgagctatgcctgggcctggccacgggtgggacccgctgtggcactagctgtggaggctctgggccgggcactgcccgtggacctgcggtttgtcagctccgaactggaaggcgcctgctctgagtacctggcaccgctgagcgctgtggacctcaagctgtaccatgaccccgacctgctgttaggtcccggttgcgtgtaccctgctgcctctgtggcccgctttgcctcccactggcgccttcccctgctgactgcgggtgctgtggcctctggtttttcggctaagaatgaccattatcgtaccctggttcgcactggcccctctgctcccaagctgggtgagtttgtggtgacactacacgggcacttcaattggactgcccgtgctgccttgctgtacctggatgctcgcacagatgaccggcctcactacttcaccatcgagggcgtctttgaggccctgcagggcagcaacctcagtgtgcagcaccaggtgtatgcccgagagccagggggccccgagcaggccacccacttcatccgggccaacgggcgcattgtgtatatctgcggccctctggagatgctgcatgagatcctgcttcaggcccagagggagaatctgaccaatggggattatgtcttcttttacctggatgtctttggggagagtctccgtgcaggccccacacgtgctacaggccggccctggcaggacaatcgcacccgggaacaggcccaggccctcagagaggcctttcagactgtattggtgatcacgtaccgagaacccccaaatcctgagtatcaggaattccagaatcgtctgctgataagagcccgggaagactttggtgtggagctgggcccttccctgatgaacctcatcgctggctgcttctatgatgggatcctgctatatgctgaagtcctgaatgagacaatacaggaaggaggcacccgggaggatggacttcgaattgtggaaaagatgcagggacgaagatatcacggtgtaactgggctggttgtcatggacaagaacaatgaccgagagactgactttgtcctctgggccatgggagacctggattctggggactttcagcctgcagcccactactcgggagctgagaagcagatttggtggacgggacggcctattccctgggtgaagggggctcctccctcggacaatcccccctgtgcctttgacttggacgacccatcctgtgataaaactccactttcaaccctggcaattgtggctctgggcacaggaatcaccttcatcatgtttggtgtttccagcttcctaattttccgaaagctgatgctggagaaggagctggctagcatgttgtggcgtattcgctgggaagaactgcagtttggcaactcagagcgttatcacaaaggtgcaggcagtcgcctcacactgtcgctgcggggatccagttacggctcgctcatgacagcccatgggaaataccagatctttgccaacaccggtcacttcaagggaaatgttgtcgccatcaaacatgtgaataagaagcgcattgagctgacccggcaggttctgtttgaactcaaacatatgagagatgttcagttcaaccatctcactcgcttcattggcgcctgcatagaccctcccaacatttgcattgtcactgaatactgtcctcgtgggagtttacaggatattctagaaaatgacagcatcaacttggactggatgtttcgttattcactcattaatgaccttgttaagggcatggcctttctccacaacagcattatttcatcgcatgggagtctcaagtcctccaactgtgtggtggatagtcgttttgtgctcaaaatcacagactatggcctggccagcttccgatcaactgctgaacctgatgacagccatgccctctatgccaagaagctgtggactgccccagaactgctcagtgggaaccccttgccaaccacaggcatgcagaaggctgacgtctatagctttgggatcatcctgcaggagatagcacttcgcagtggtcctttctacttggagggcctggacctcagccccaaagagattgtccagaaggtacgaaatggtcagcggccatatttccggccaagcattgaccggtcccaactgaatgaagagctagttttgctgatggagcgatgttgggctcaggacccagctgagcggccagactttggacagattaagggcttcattcggcgctttaacaaggagggtggcaccagcatattggacaacctcctgctgcgcatggaacagtatgccaataacttggagaagctggtggaggaacgcacacaggcctatctggaggaaaaacgcaaggctgaagctctgctctaccaaatcctaccccattcagtggcagagcagttaaaacggggagagactgtacaggctgaggcctttgacagtgttaccatctacttcagtgacattgttggcttcacagcattgtcagcagagagcacccccatgcaggtagtgacacttcttaatgacctgtatacctgctttgatgccataattgacaactttgatgtctacaaggtggagacgattggggatgcttacatggtggtatctggcctcccaggccgaaatggtcaacgccatgcaccagaaattgctcgtatggccctagcattactagatgcagtttcttcctttcgcatccgccaccgaccccatgaccagctgaggctacgcataggggtccatactgggccagtctgtgctggggttgttggcctgaagatgccccgttattgtctttttggagacacagtgaacactgcttctcgaatggagtctaatggtcaagcgctgaagatccatgtctcctctaccaccaaggatgccctagatgagctaggatgcttccagctagagcttcggggggatgtggaaatgaagggaaaaggaaagatgcgaacatactggctcttaggagagcggaaaggacctcctggactcctgtaa

SEQ ID NO: 324 - protein, 1047 aa, Homo sapiens
  P20594
MALPSLLLLVAALAGGVRPPGARNLTLAVVLPEHNLSYAWAWPRVGPAVALAVEALGRALPVDLRFVSSELEGACSEYLAPLSAVDLKLYHDPDLLLGPGCVYPAASVARFASHWRLPLLTAGAVASGFSAKNDHYRTLVRTGPSAPKLGEFVVTLHGHFNWTARAALLYLDARTDDRPHYFTIEGVFEALQGSNLSVQHQVYAREPGGPEQATHFIRANGRIVYICGPLEMLHEILLQAQRENLTNGDYVFFYLDVFGESLRAGPTRATGRPWQDNRTREQAQALREAFQTVLVITYREPPNPEYQEFQNRLLIRAREDFGVELGPSLMNLIAGCFYDGILLYAEVLNETIQEGGTREDGLRIVEKMQGRRYHGVTGLVVMDKNNDRETDFVLWAMGDLDSGDFQPAAHYSGAEKQIWWTGRPIPWVKGAPPSDNPPCAFDLDDPSCDKTPLSTLAIVALGTGITFIMFGVSSFLIFRKLMLEKELASMLWRIRWEELQFGNSERYHKGAGSRLTLSLRGSSYGSLMTAHGKYQIFANTGHFKGNVVAIKHVNKKRIELTRQVLFELKHMRDVQFNHLTRFIGACIDPPNICIVTEYCPRGSLQDILENDSINLDWMFRYSLINDLVKGMAFLHNSIISSHGSLKSSNCVVDSRFVLKITDYGLASFRSTAEPDDSHALYAKKLWTAPELLSGNPLPTTGMQKADVYSFGIILQEIALRSGPFYLEGLDLSPKEIVQKVRNGQRPYFRPSIDRTQLNEELVLLMERCWAQDPAERPDFGQIKGFIRRFNKEGGTSILDNLLLRMEQYANNLEKLVEERTQAYLEEKRKAEALLYQILPHSVAEQLKRGETVQAEAFDSVTIYFSDIVGFTALSAESTPMQVVTLLNDLYTCFDAIIDNFDVYKVETIGDAYMVVSGLPGRNGQRHAPEIARMALALLDAVSSFRIRHRPHDQLRLRIGVHTGPVCAGVVGLKMPRYCLFGDTVNTASRMESNGQALKIHVSSTTKDALDELGCFQLELRGDVEMKGKGKMRTYWLLGERKGPPGLL

SEQ ID NO: 325 - DNA, 1668 bp, Homo sapiens; identical to SEQ ID NO: 287
  AY033889

SEQ ID NO: 326 - protein, 555 aa, Homo sapiens [sequence omitted]

SEQ ID NO: 327 - DNA, 2424 bp, Homo sapiens
  AB051390
atgaggctgtccccggcgcccctgaagctgagccggactccggcactgctggccctggcgctgcccctggccgcggcgctggccttctccgacgagaccctggacaaagtgcccaagtcagagggctactgtagccgtatcctgcgcgcccagggcacgcggcgcgagggctacaccgagttcagcctccgcgtggagggcgaccccgacttctacaagccgggaaccagctaccgcgtaacactttcagctgctcctccctcctacttcagaggattcacattaattgccctcagagagaacagagagggtgataaggaagaagaccatgctgggaccttccagatcatagacgaagaagaaactcagtttatgagcaattgccctgttgcagtcactgaaagcactccacggaggaggacccggatccaggtgttttggatagcaccaccagcgggaacaggctgcgtgattctgaaggccagcatcgtacaaaaacgcattatttattttcaagatgagggctctctgaccaagaaactttgtgaacaagattccacatttgatggggtgactgacaaacccatcttagactgctgtgcctgcggaactgccaagtacagactcacattttatgggaattggtccgagaagacacacccaaaggattaccctcgtcgggccaaccactggtctgcgatcatcggaggatcccactccaagaattatgtactgtgggaatatggaggatatgccagcgaaggcgtcaaacaagttgcagaattgggctcacccgtgaaaatggaggaagaaattcgacaacagagtgatgaggtcctcaccgtcatcaaagccaaagcccaatggccagcctggcagcctctcaacgtgagagcagcaccttcagctgaattttccgtggacagaacgcgccatttaatgtccttcctgaccatgatgggccctagtcccgactggaacgtaggcttatctgcagaagatctgtgcaccaaggaatgtggctgggtccagaaggtggtgcaagacctgattccctgggacgctggcaccgacagcggggtgacctatgagtcacccaacaaacccaccattccccaggagaaaatccggcccctgaccagcctggaccatcctcagagtcctttctatgacccagagggtgggtccatcactcaagtagccagagttgtcatcgagagaatcgcacggaagggtgaacaatgcaatattgtacctgacaatgtcgatgatattgtagctgacctggctccagaagagaaagatgaagatgacacccctgaaacctgcatctactccaactggtccccatggtccgcctgcagctcctccacctgtgacaaaggcaagaggatgcgacagcgcatgctgaaagcacagctggacctcagcgtcccctgccctgacacccaggacttccagccctgcatgggccctggctgcagtgacgaagacggctccacctgcaccatgtccgagtggatcacctggtcgccctgcagcatctcctgcggcatgggcatgaggtcccgggagaggtatgtgaagcagttcccggaggacggctccgtgtgcacgctgcccactgaggaaatggagaagtgcacggtcaacgaggagtgctctcccagcagctgcctgatgaccgagtggggcgagtgggacgagtgcagcgccacctgcggcatgggcatgaagaagcggcaccgcatgatcaagatgaaccccgcagatggctccatgtgcaaagccgagacatcacaggcagagaagtgcatgatgccagagtgccacaccatcccatgcttgctgtccccatggtccgagtggagtgactgcagcgtgacctgcgggaagggcatgcgaacccgacagcggatgctcaagtctctggcagaacttggagactgcaatgaggatctggagcaggtggagaagtgcatgctccctgaatgccccattgactgtgagctcaccgagtggtcccagtggtcggaatgtaacaagtcatgtgggaaaggccacgtgattcgaacccggatgatccaaatggagcctcagtttggaggtgcaccctgcccagagactgtgcagcgaaaaaagtgccgcatccgaaaatgccttcgaaatccatccatccaaaagccacgctggagggaggcccgagagagccggcggagtgagcagctgaaggaagagtctgaaggggagcagttcccaggttgtaggatgcgcccatggacggcctggtcagaatgcaccaaactgtgcggaggtggaattcaggaacgttacatgactgtaaagaagagattcaaaagctcccagtttaccagctgcaaagacaagaaggagatcagagcatgcaatgttcatccttgttag

SEQ ID NO: 328 - protein, 807 aa, Homo sapiens [sequence omitted]

SEQ ID NO: 329 - DNA, 4338 bp, Homo sapiens
  AF410459
atgcagggcccaccgctcctgaccgccgcccacctcctctgcgtgtgcaccgccgcgctggccgtggctcccgggcctcggtttctggtgacagccccagggatcatcaggcccggaggaaatgtgactattggggtggagcttctggaacactgcccttcacaggtgactgtgaaggcggagctgctcaagacagcatcaaacctcactgtctctgtcctggaagcagaaggagtctttgaaaaaggctcttttaagacacttactcttccatcactacctctgaacagtgcagatgagatttatgagctacgtgtaaccggacgtacccaggatgagattttattctctaatagtacccgcttatcatttgagaccaagagaatatctgtcttcattcaaacagacaaggccttatacaagccaaagcaagaagtgaagtttcgcattgttacactcttctcagattttaagccttacaaaacctctttaaacattctcattaaggaccccaaatcaaatttgatccaacagtggttgtcacaacaaagtgatcttggagtcatttccaaaacttttcagctatcttcccatccaatacttggtgactggtctattcaagttcaagtgaatgaccagacatattatcaatcatttcaggtttcagaatatgtattaccaaaatttgaagtgactttgcagacaccattatattgttctatgaattctaagcatttaaatggtaccatcacggcaaagtatacatatgggaagccagtgaaaggagacgtaacgcttacatttttacctttatccttttggggaaagaagaaaaatattacaaaaacatttaagataaatggatctgcaaacttctcttttaatgatgaagagatgaaaaatgtaatggattcttcaaatggactttctgaatacctggatctatcttcccctggaccagtagaaattttaaccacagtgacagaatcagttacaggtatttcaagaaatgtaagcactaatgtgttcttcaagcaacatgattacatcattgagttttttgattatactactgtcttgaagccatctctcaacttcacagccactgtgaaggtaactcgtgctgatggcaaccaactgactcttgaagaaagaagaaataatgtagtcataacagtgacacagagaaactatactgagtactggagcggatctaacagtggaaatcagaaaatggaagctgttcagaaaataaattatactgtcccccaaagtggaacttttaagattgaattcccaatcctggaggattccagtgagctacagttgaaggcctatttccttggtagtaaaagtagcatggcagttcatagtctgtttaagtctcctagtaagacatacatccaactaaaaacaagagatgaaaatataaaggtgggatcgccttttgagttggtggttagtggcaacaaacgattgaaggagttaagctatatggtagtatccaggggacagttggtggctgtaggaaaacaaaattcaacaatgttctctttaacaccagaaaattcttggactccaaaagcctgtgtaattgtgtattatattgaagatgatggggaaattataagtgatgttctaaaaattcctgttcagcttgtttttaaaaataagataaagctatattggagtaaagtgaaagctgaaccatctgagaaagtctctcttaggatctctgtgacacagcctgactccatagttgggattgtagctgttgacaaaagtgtgaatctgatgaatgcctctaatgatattacaatggaaaatgtggtccatgagttggaactttataacacaggatattatttaggcatgttcatgaattcttttgcagtctttcaggaatgtggactctgggtattgacagatgcaaacctcacgaaggattatattgatggtgtttatgacaatgcagaatatgctgagaggtttatggaggaaaatgaaggacatattgtagatattcatgacttttctttgggtagcagtccacatgtccgaaagcattttccagagacttggatttggctagacaccaacatgggttacaggatttaccaagaatttgaagtaactgtacctgattctatcacttcttgggtggctactggttttgtgatctctgaggacctgggtcttggactaacaactactccagtggagctccaagccttccaaccatttttcatttttttgaatcttccctactctgttatcagaggtgaagaatttgctttggaaataactatattcaattatttgaaagatgccactgaggttaaggtaatcattgagaaaagtgacaaatttgatattctaatgacttcaaatgaaataaatgccacaggccaccagcagacccttctggttcccagtgaggatggggcaactgttctttttcccatcaggccaacacatctgggagaaattcctatcacagtcacagctctttcacccactgcttctgatgctgtcacccagatgattttagtaaaggctgaaggaatagaaaaatcatattcacaatccatcttattagacttgactgacaataggctacagagtaccctgaaaactttgagtttctcatttcctcctaatacagtgactggcagtgaaagagttcagatcactgcaattggagatgttcttggtccttccatcaatggcttagcctcattgattcggatgccttatggctgtggtgaacagaacatgataaattttgctccaaatatttacattttggattatctgactaaaaagaaacaactgacagataatttgaaagaaaaagctctttcatttatgaggcaaggttaccagagagaacttctctatcagagggaagatggctctttcagtgcttttgggaattatgacccttctgggagcacttggttgtcagcttttgttttaagatgtttccttgaagccgatccttacatagatattgatcagaatgtgttacacagaacatacacttggcttaaaggacatcagaaatccaacggtgaattttgggatccaggaagagtgattcatagtgagcttcaaggtggcaataaaagtccagtaacacttacagcctatattgtaacttctctcctgggatatagaaagtatcagcctaacattgatgtgcaagagtctatccattttttggagtctgaattcagtagaggaatttcagacaattatactctagcccttataacttatgcattgtcatcagtggggagtcctaaagcgaaggaagctttgaatatgctgacttggagagcagaacaagaaggtggcatgcaattctgggtgtcatcagagtccaaactttctgactcctggcagccacgctccctggatattgaagttgcagcctatgcactgctctcacacttcttacaatttcagacttctgagggaatcccaattatgaggtggctaagcaggcaaagaaatagcttgggtggttttgcatctactcaggataccactgtggctttaaaggctctgtctgaatttgcagccctaatgaatacagaaaggacaaatatccaagtgaccgtgacggggcctagctcaccaagtcctgtaaagtttctgattgacacacacaaccgcttactccttcagacagcagagcttgctgtggtacagccaatggcagttaatatttccgcaaatggttttggatttgctatttgtcagctcaatgttgtatataatgtgaaggcttctgggtcttctagaagacgaagatctatccaaaatcaagaagcctttgatttagatgttgctgtaaaagaaaataaagatgatctcaatcatgtggatttgaatgtgtgtacaagcttttcgggcccgggtaggagtggcatggctcttatggaagttaacctattaagtggctttatggtgccttcagaagcaatttctctgagcgagacagtgaagaaagtggaatatgatcatggaaaactcaacctctatttagattctgtaaatgaaacccagttttgtgttaatattcctgctgtgagaaactttaaagtttcaaatacccaagatgcttcagtgtccatagtggattactatgagccaaggagacaggcggtgagaagttacaactctgaagtgaagctgtcctcctgtgacctttgcagtgatgtccagggctgccgtccttgtgaggatggagcttcaggctcccatcatcactcttcagtcatttttattttctgtttcaagcttctgtactttatggaactttggctgtga

SEQ ID NO: 330 - protein, 1445 aa, Homo sapiens; identical to SEQ ID NO: 240
  Q8TDJ3

SEQ ID NO: 331 - DNA, 2016 bp, Homo sapiens
  Z92867
atgagcgagctagaggaagactttgccaagattctcatgctcaaggaggagaggatcaaagagctggagaagcggctgtcagagaaggaggaagaaattcaggagctgaagaggaaactccacaaatgccagtcggtgctcccagtgccctcgacccacatcggcccccggaccacccgggcgcagggcatctcggccgagccgcagacgtacaggtccttccacgacctccgacaggcattccggaagttcaccaagtccgaaaggtccaaggatcttataaaggaagctatccttgacaatgactttatgaagaacttggagctgtcgcagatccaggagattgtggattgtatgtacccggtggagtatggcaaggacagttgcatcatcaaagaaggagacgtggggtcactggtgtatgtcatggaagatggtaaggttgaagttacaaaagaaggtgtgaagttgtgtaccatgggtccaggaaaagtgtttggggaattggctattctttacaactgtacccggacagcgaccgtcaagactcttgtaaatgtaaaactctgggccattgatcgacaatgttttcaaacaataatgatgaggacaggactcatcaagcataccgagtatatggaatttttaaaaagcgttccaacattccagagccttcctgaagagatcctcagcaagcttgctgatgtccttgaagagacccactatgaaaatggagaatatattatcaggcaaggtgcaagaggggacaccttctttatcatcagcaaaggaacggtaaatgtcactcgtgaagactcaccgagtgaagacccagtctttcttagaactttaggaaaaggagactggtttggagagaaagccttgcagggggaagatgtgagaacagcaaacgtaattgctgcagaagctgtaacctgccttgtgattgacagagactcttttaaacatttgattggagggctggatgatgtttctaataaagcatatgaagatgcagaagctaaagcaaaatatgaagctgaagcggctttcttcgccaacctgaagctgtctgatttcaacatcattgatacccttggagttggaggtttcggacgagtagaactggtccagttgaaaagtgaagaatccaaaacgtttgcaatgaagattctcaagaaacgtcacattgtggacacaagacagcaggagcacatccgctcagagaagcagatcatgcagggggctcattccgatttcatagtgagactgtacagaacatttaaggacagcaaatatttgtatatgttgatggaagcttgtctaggtggagagctctggaccattctcagggatagaggttcgtttgaagattctacaaccagattttacacagcatgtgtggtagaagcttttgcctatctgcattccaaaggaatcatttacagggacctcaagccagaaaatctcatcctagatcaccgaggttatgccaaactggttgattttggctttgcaaagaaaataggatttggaaagaaaacatggactttttgtgggactccagagtatgtagccccagagatcatcctgaacaaaggccatgacatttcagccgactactggtcactgggaatcctaatgtatgaactcctgactggcagcccacctttctcaggcccagatcctatgaaaacctataacatcatattgagggggattgacatgatagaatttccaaagaagattgccaaaaatgctgctaatttaattaaaaaactatgcagggacaatccatcagaaagattagggaatttgaaaaatggagtaaaagacattcaaaagcacaaatggtttgagggctttaactgggaaggcttaagaaaaggtaccttgacacctcctataataccaagtgttgcatcacccacagacacaagtaattttgacagtttccctgaggacaacgatgaaccaccacctgatgacaactcaggatgggatatagacttctaa

SEQ ID NO: 332 - protein, 671 aa, Homo sapiens
  Q13976
MSELEEDFAKILMLKEERIKELEKRLSEKEEEIQELKRKLHKCQSVLPVPSTHIGPRTTRAQGISAEPQTYRSFHDLRQAFRKFTKSERSKDLIKEAILDNDFMKNLELSQIQEIVDCMYPVEYGKDSCIIKEGDVGSLVYVMEDGKVEVTKEGVKLCTMGPGKVFGELAILYNCTRTATVKTLVNVKLWAIDRQCFQTIMMRTGLIKHTEYMEFLKSVPTFQSLPEEILSKLADVLEETHYENGEYIIRQGARGDTFFIISKGTVNVTREDSPSEDPVFLRTLGKGDWFGEKALQGEDVRTANVIAAEAVTCLVIDRDSFKHLIGGLDDVSNKAYEDAEAKAKYEAEAAFFANLKLSDFNIIDTLGVGGFGRVELVQLKSEESKTFAMKILKKRHIVDTRQQEHIRSEKQIMQGAHSDFIVRLYRTFKDSKYLYMLMEACLGGELWTILRDRGSFEDSTTRFYTACVVEAFAYLHSKGIIYRDLKPENLILDHRGYAKLVDFGFAKKIGFGKKTWTFCGTPEYVAPEIILNKGHDISADYWSLGILMYELLTGSPPFSGPDPMKTYNIILRGIDMIEFPKKIAKNAANLIKKLCRDNPSERLGNLKNGVKDIQKHKWFEGFNWEGLRKGTLTPPIIPSVASPTDTSNFDSFPEDNDEPPPDDNSGWDIDF

SEQ ID NO: 333 - DNA, 4062 bp, Homo sapiens
  AJ133123
atggcttccccgccccaccagcagctgctgcatcaccacagcaccgaggtgagctgcgactccagcggggacagcaacagcgtgcgcgtcaagatcaaccccaagcagctgtcctccaacagccaccccaagcactgcaaatacagcatctcctctagctgcagcagctctggggactccgggggcgtcccccggcgagtgggcggcggaggccggctgcgcaggcagaagaagctgccccagctgttcgagagggcctccagccgctggtgggaccccaagttcgactcggtgaacctggaggaggcctgcctggagcgctgcttcccgcagacccagcgccggttccggtatgcgctcttctacatcggcttcgcctgccttctgtggagcatctattttgcggtccacatgagatccagactgatcgtcatggtcgcccccgcgctgtgcttcctcctggtgtgtgtgggcttctttctgtttaccttcaccaagctgtacgcccggcattacgcgtggacctcgctggctctcaccctgctggtgttcgccctgaccctggctgcgcagttccaggtcttgacgcctgtctcaggacgcggcgacagctccaaccttacggccacagcccggcccacagatacttgcttatctcaagtggggagcttctccatgtgcatcgaagtgctctttttgctctataccgtcatgcacttacctttgtacctgagtttgtgtctgggggtggcctactctgtccttttcgagacctttggctaccatttccgggatgaagcctgcttcccctcgcccggagccggggccctgcactgggagctgctgagcagggggctgctccacggctgcatccacgccatcggggtccacctgttcgtcatgtcccaggtgaggtccaggagcaccttcctcaaggtggggcaatccattatgcacgggaaggacctggaagtggaaaaagccctcaaagagaggatgattcattccgtgatgccaagaatcatagccgatgacttaatgaagcagggagatgaggagagtgagaattctgtcaagagacatgccacctcgagccccaagaacaggaagaaaaagtcttccatccaaaaagctcctatagccttccgcccttttaagatgcagcagatcgaagaagtcagtattttatttgcagatatcgtgggcttcaccaagatgagtgccaacaagtctgcccacgccctggtgggtctcctgaacgatctgttcggtcgcttcgaccgcctgtgtgaggagaccaagtgtgagaaaatcagcaccctgggagactgttactactgcgtggcgggctgtcccgagccccgggccgaccatgcctactgctgcatcgagatgggcctgggcatgatcaaggccatcgagcagttctgccaggagaagaaggagatggtgaacatgagagtcggggtgcacacgcgcaccgtcctttgcggcatcctgggcatgaggaggtttaaatttgacgtgtggtccaacgatgtgaacctggccaatctcatggagcagctgggagtggccggcaaagttcacatttctgaggccaccgcaaaatacttagatgaccggtacgaaatggaagatgggaaagttattgaacggctgggccagagcgtggttgctgaccagttgaaaggtttgaagacatacctgatatcgggtcagagagccaaggagtctcgctgcagctgtgcagaggccttgctttctggctttgaggtcattgacggctcacaggtgtcctcaggccctaggggacaggggacagcgtcatcagggaatgtcagtgacttggcgcagactgtcaaaacctttgataaccttaagacctgcccttcgtgcggaatcacatttgctcccaaatctgaagccggcgccgagggaggagcacctcaaaacggctgccaagacgagcataaaaacagcaccaaggcttctggaggacctaatcccaaaactcagaacgggctcctcagccctccccaagaggagaagctcaccaacagtcagacttctctgtgtgagatcttgcaggagaagggaaggtgggcaggggtgagcctggaccagtcggctctccttccgctgaggttcaagaacatccgggagaaaacggacgcccactttgtggacgttatcaaagaagacagcctgatgaaagattacttttttaagccgcccattaatcagttcagcctgaacttcctggatcaggagctggagcgatcctacaggaccagctatcaggaagaggtcataaagaactcccccgtgaagacgtttgctagtcccaccttcagctccctcctggatgtgtttctgtcgaccacagtgtttctgacgctgtccaccacctgcttcctgaagtacgaggcggccaccgtgcctcccccgcccgccgccctggcggtcttcagtgcagccctgctgctggaggtgctgtccctcgcggtgtccatcaggatggtgttcttcctggaggacgtcatggcctgcaccaagcgcctgctggagtggatcgccggctggctaccacgtcactgcatcggggccatcctggtgtcgcttcccgcactggccgtctactcccatgcaacctccgaatatgagaccaacatacacttcccagtgttcacaggctcggccgcgctgattgccgtcgtgcactactgtaacttctgccagctcagctcctggatgaggtcctccctcgccaccgtcgtgggggccgggccgctgctcctgctctacgtctccctgtgcccagacagttctgtattaacttcgccccttgacgcagtacagaatttcagttccgagaggaacccgtgcaatagttcggtgccgcgtgacctccggcggcccgccagcctcatcggccaggaggtggttctcgtcttctttctcctgctcttgttggtctggttcctgaatcgcgaatttgaagtcagctaccgcctccactaccacggagacgtggaagcggatcttcaccgcaccaagatccagagcatgcgggaccaggcagactggctgctgaggaacatcatcccctaccacgtggctgagcagctgaaggtgtcccagacctactccaagaaccacgacagcggaggggtgatcttcgccagcatcgtcaacttcagcgagttctacgaggagaactacgagggcggcaaggagtgctaccgggtcctcaacgagctcatcggggactttgacgagctcctaagcaagccggactacagcagcatcgagaagatcaagaccatcggagccacgtacatggcggcgtcagggctgaacaccgcgcaggcccaggacggcagccacccgcaggagcacctgcagatcctgttcgagttcgccaaggagatgatgcgcgtggtggacgacttcaacagcaacatgctgtggttcaacttcaagctccgcgtcggcttcaaccatgggcccctcacggccggggtcatcggcaccaccaagctgctgtacgacatctggggagacaccgtcaacatcgccagcaggatggacaccaccggcgtggagtgccgcatccaggtgagcgaagagagctaccgcgtcttgagcaagatgggctatgacttcgactacagagggaccgtgaatgtcaaggggaaaggccagatgaagacctacctgtacccaaagtgcacggatcacagggtcatcccacagcaccagctgtccatctccccagacatccgcgtccaggtggatggcagcatcggacggtctcccacagacgagattgccaacctggtgccttctgtccagtatgtggacaagacatctctgggttctgacagcagcacgcaggccaaggatgcccacctgtcccgcaagagaccgtggaaggagcccgtcaaagccgaagaaaggggtcgatttggcaaagccatagagaaagacgactgtgacgaaacaggaatagaagaagccaacgaactcaccaagctcaacgtttcaaagagtgtgtga

SEQ ID NO: 334 - protein, 1353 aa, Homo sapiens
  O60503
MASPPHQQLLHHHSTEVSCDSSGDSNSVRVKINPKQLSSNSHPKHCKYSISSSCSSSGDSGGVPRRVGGGGRLRRQKKLPQLFERASSRWWDPKFDSVNLEEACLERCFPQTQRRFRYALFYIGFACLLWSIYFAVHMRSRLIVMVAPALCFLLVCVGFFLFTFTKLYARHYAWTSLALTLLVFALTLAAQFQVLTPVSGRGDSSNLTATARPTDTCLSQVGSFSMCIEVLFLLYTVMHLPLYLSLCLGVAYSVLFETFGYHFRDEACFPSPGAGALHWELLSRGLLHGCIHAIGVHLFVMSQVRSRSTFLKVGQSIMHGKDLEVEKALKERMIHSVMPRIIADDLMKQGDEESENSVKRHATSSPKNRKKKSSIQKAPIAFRPFKMQQIEEVSILFADIVGFTKMSANKSAHALVGLLNDLFGRFDRLCEETKCEKISTLGDCYYCVAGCPEPRADHAYCCIEMGLGMIKAIEQFCQEKKEMVNMRVGVHTGTVLCGILGMRRFKFDVWSNDVNLANLMEQLGVAGKVHISEATAKYLDDRYEMEDGKVIERLGQSVVADQLKGLKTYLISGQRAKESRCSCAEALLSGFEVIDGSQVSSGPRGQGTASSGNVSDLAQTVKTFDNLKTCPSCGITFAPKSEAGAEGGAPQNGCQDEHKNSTKASGGPNPKTQNGLLSPPQEEKLTNSQTSLCEILQEKGRWAGVSLDQSALLPLRFKNIREKTDAHFVDVIKEDSLMKDYFFKPPINQFSLNFLDQELERSYRTSYQEEVIKNSPVKTFASPTFSSLLDVFLSTTVFLTLSTTCFLKYEAATVPPPPAALAVFSAALLLEVLSLAVSIRMVFFLEDVMACTKRLLEWIAGWLPRHCIGAILVSLPALAVYSHVTSEYETNIHFPVFTGSAALIAVVHYCNFCQLSSWMRSSLATVVGAGPLLLLYVSLCPDSSVLTSPLDAVQNFSSERNPCNSSVPRDLRRPASLIGQEVVLVFFLLLLLVWFLNREFEVSYRLHYHGDVEADLHRTKIQSMRDQADWLLRNIIPYHVAEQLKVSQTYSKNHDSGGVIFASIVNFSEFYEENYEGGKECYRVLNELIGDFDELLSKPDYSSIEKIKTIGATYMAASGLNTAQAQDGSHPQEHLQILFEFAKEMMRVVDDFNNNMLWFNFKLRVGFNHGPLTAGVIGTTKLLYDIWGDTVNIASRMDTTGVECRIQVSEESYRVLSKMGYDFDYRGTVNVKGKGQMKTYLYPKCTDHRVIPQHQLSISPDIRVQVDGSIGRSPTDEIANLVPSVQYVDKTSLGSDSSTQAKDAHLSPKRPWKEPVKAEERGRFGKAIEKDDCDETGIEEANELTKLNVSKSV

SEQ ID NO: 335 - DNA, 3435 bp, Homo sapiens
  AF033861
atgccgaggaaccagggcttctccgagcccgaatactcggccgagtactcagccgagtactccgtcagcctgccctccgaccctgaccgcggggtgggccggacccatgaaatctcggtccggaactcgggctcctgcctgtgcctgcctcgcttcatgcggctgactttcgtgccggagtccttggagaacctctaccagacctacttcaaaaggcagcgccacgagaccctgctggtgctggtggtctttgcagccctctttgactgctacgtggtggtcatgtgtgctgtggtcttctccagcgacaagctggctcccctcgccgtggctggaattggactggtgttggacatcatcctcttcgtgctctgcaaaaaggggctgctcccggaccgggtcacccgcagagtgctgccctacgtgctgtggctgctcataaccgcccagatcttctcctacctgggcctgaacttcgcgcgtgcccacgcggctagtgacacggtgggctggcaggtcttctttgtcttctccttcttcatcacgctgcccctcagcctcagccccatcgtgatcatctccgtggtctcctgtgtggtgcacacgttggtcctgggggtcaccgtggcccagcagcagcaggaggagctcaaggggatgcagctgctgcgggagatcctggccaacgtcttcctctacctgtgcgccatcgctgtgggcatcatgtcctactacatggctgaccgcaagcaccgcaaggccttcctggaggcccgccagtcgctggaggtgaagatgaacctggaagagcagagccagcagcaggagaacctcatgctttccatcctgcccaagcacgtggctgacgagatgctgaaagacatgaagaaagacgagagccagaaggaccagcagcagttcaacaccatgtacatgtaccgtcacgagaacgtcagcatcctctttgccgacatcgtgggctttacccagctgtcttctgcctgcagtgcccaggagcttgtgaagctgctcaacgagctctttgcccgctttgacaagctggcagctaaataccaccagctgcggattaagatcctgggcgactgctactactgcatctgcggcttgcctgactaccgggaggaccacgccgtctgctccatcctcatggggctggccatggtggaggccatctcgtatgtgcgggagaagaccaagactggggtggacatgcgtgtgggggtgcacacgggcaccgtgctggggggcgtcctgggccagaagcgctggcagtacgacgtgtggtcgactgatgtcactgtagccaacaagatggaggccggcggcatccctgggcgcgtgcacatctcccagagcaccatggactgcctgaaaggggagtttgatgtggagccaggcgatgggggcagccgctgtgattacctagaagagaagggtattgaaacctacctcatcattgcctccaagccagaggtgaagaaaacagccacccagaatggcctcaatggctcggccctgcccaatggagcaccagcttcctcaaagtccagctcccctgccctcattgagaccaaggagcccaacgggagtgcccacagcagtgggtccacgtcggagaagcccgaggagcaggatgcccaggccgacaacccctcattccccaacccacgccggaggctgcgcctgcaggacctggctgaccgagtggtggatgcctctgaagatgagcacgagctcaaccagctgctcaacgaggccctgcttgagcgagagtccgcccaagtagtaaagaagagaaacaccttcctcttgtccatgcggttcatggaccccgagatggaaacccgctactcggtggagaaggagaagcagagtggggctgccttcagctgctcctgcgtcgtcctgctctgcacggccctggtcgagatactcatcgacccctggctaatgacaaactatgtgaccttcatggtgggggagattctgctcctcatcctgaccatctgctccctggctgccatctttccccgggcctttcctaagaagcttgtggccttctcaacttggattgaccggacccgctgggccaggaacacctgggccatgctcgccatcttcatcctggtgatggcaaatgtcgtggacatgctcagctgtctccagtactacacgggacccagcaatgcaacggcagggatggagacggagggcagctgcctggagaaccccaagtattacaactatgtggccgtgctgtccctcatcgccaccatcatgctggtgcaggtcagccacatggtgaagctcacgctcatgctgctcgtcgcaggcgccgtggccaccatcaacctctatgcctggcgtcccgtctttgatgaatacgaccacaagcgttttcgggagcacgacttacctatggtggccttagagcagatgcaaggattcaaccctgggctcaatggcactgacaggctgcccctggtgccttccaagtactctatgacggtgatggtgttcctcatgatgctcagcttctactacttctcccgccacgtagaaaaactggcacggacacttttcttgtggaagattgaggtccacgaccagaaggaacgtgtctatgagatgcgacgctggaacgaggccttggtcaccaacatgttgcctgagcacgtggcacgccatttcctggggtccaagaagagagatgaggagctgtatagccagacgtatgatgagattggagtcatgtttgcctccctgcccaactttgctgacttctacacagaggagagcatcaacaatggtggtattgagtgtctgcgtttcctcaatgaaatcatctcagattttgactctctcctggacaatcccaagttccgggtgatcaccaagatcaaaaccattggcagcacgtatatggcggcttcaggagtcacccccgatgtcaacaccaatggctttgccagctccaacaaggaagacaagtccgagagagagcgctggcagcacctggctgacctggccgacttcgcgctggccatgaaggatacgctcaccaacatcaacaaccagtccttcaataacttcatgctgcgcataggcatgaacaaaggcggggttctggctggggtcatcggagcccggaaaccacactacgacatctggggcaatacagtcaatgtagccagcaggatggagtccacgggggtcatgggcaacattcaggtggtagaagaaacccaagtcatcctccgagagtacggcttccgctttgtgaggcgaggccccatctttgtgaaggggaagggggagctgctgaccttcttcttgaaggggcgggataagctagccaccttccccaatggcccctctgtcacactgccccaccaggtggtggacaactcctga

SEQ ID NO: 336 - protein, 1144 aa, Homo sapiens
  O60266
MPRNQGFSEPEYSAEYSAEYSVSLPSDPDRGVGRTHEISVRNSGSCLCLPRFMRLTFVPESLENLYQTYFKRQRHETLLVLVVFAALFDCYVVVMCAVVFSSDKLAPLAVAGIGLVLDIILFVLCKKGLLPDRVTRRVLPYVLWLLITAQIFSYLGLNFARAHAASDTVGWQVFFVFSFFITLPLSLSPIVIISVVSCVVHTLVLGVTVAQQQQEELKGMQLLREILANVFLYLCAIAVGIMSYYMADRKHRKAFLEARQSLEVKMNLEEQSQQQENLMLSILPKHVADEMLKDMKKDESQKDQQQFNTMYMYRHENVSILFADIVGFTQLSSACSAQELVKLLNELFARFDKLAAKYHQLRIKILGDCYYCICGLPDYREDHAVCSILMGLAMVEAISYVREKTKTGVDMRVGVHTGTVLGGVLGQKRWQYDVWSTDVTVANKMEAGGIPGRVHISQSTMDCLKGEFDVEPGDGGSRCDYLEEKGIETYLIIASKPEVKKTATQNGLNGSALPNGAPASSKSSSPALIETKEPNGSAHSSGSTSEKPEEQDAQADNPSFPNPRRRLRLQDLADRVVDASEDEHELNQLLNEALLERESAQVVKKRNTFLLSMRFMDPEMETRYSVEKEKQSGAAFSCSCVVLLCTALVEILIDPWLMTNYVTFMVGEILLLILTICSLAAIFPRAFPKKLVAFSTWIDRTRWARNTWAMLAIFILVMANVVDMLSCLQYYTGPSNATAGMETEGSCLENPKYYNYVAVLSLIATIMLVQVSHMVKLTLMLLVAGAVATINLYAWRPVFDEYDHKRFREHDLPMVALEQMQGFNPGLNGTDRLPLVPSKYSMTVMVFLMMLSFYYFSRHVEKLARTLFLWKIEVHDQKERVYEMRRWNEALVTNMLPEHVARHFLGSKKRDEELYSQTYDEIGVMFASLPNFADFYTEESINNGGIECLRFLNEIISDFDSLLDNPKFRVITKIKTIGSTYMAASGVTPDVNTNGFASSNKEDKSERERWQHLADLADFALAMKDTLTNINNQSFNNFMLRIGMNKGGVLAGVIGARKPHYDIWGNTVNVASRMESTGVMGNIQVVEETQVILREYGFRFVRRGPIFVKGKGELLTFFLKGRDKLATFPNGPSVTLPHQVVDNS

SEQ ID NO: 337 - DNA, 3590 bp, Homo sapiens
  D63479
cgccgcccgaggagtcgtccgacagcgagcccgaggcggagcccggctccccacagaagctcatccgcaaggtgtccacgtcgggtcagatccgacagaagaccatcatcaaagaggggatgctgaccaaacagaacaattcattccagcgatcaaaaaggagatactttaagcttcgagggcgaacgctttactatgccaaaacggcaaagtcaatcatatttgatgaggtggatctgacagatgccagcgtagctgaatccagtaccaaaaacgtcaacaacagttttacggtcataactccatgcaggaagctcatcttgtgtgctgataacagaaaagaaatggaagattggattgcagcattaaagactgtgcagaacagggagcactttgagcccacccagtacagcatggaccacttctcagggatgcacaattggtacgcctgttcccacgcgaggccgacctactgcaatgtgtgccgtgaggctctgtctggggtcacgtcgcacgggctgtcctgcgaggtgtgcaaatttaaggcccacaagcgctgtgctgtgcgtgcaaccaataactgcaagtggaccacactggcctcgatcgggaaggacatcattgaagatgcagatgggattgcaatgccccaccagtggttggaaggaaacctacctgtgagcgccaagtgcactgtgtgcgacaagacctgtggcagtgtgctgcgcctgcaggactggcgctgcctctggtgcaaggccatggttcacacatcgtgtaaagaatccttgctgaccaagtgcccacttggcctgtgcaaagtgtcagtcatcccacccacggctctcaacagcatcgactccgatgggttctggaaggccagctgtcctccttcttgcacaagcccactgttggtcttcgtcaattcaaaaagtggggacaaccagggtgtgaagttcctcagaagattcaaacagctactaaaccccgcccaggtcttcgacctcatgaacggaggcccacacctcggcttacggttattccagaagtttgacacattccggattctggtttgtggcggggatggaagtgttggctgggtcctctccgaaatcgacagcctcaaccttcataaacagtgtcagctgggagtgctgccgctcggcacagggaacgacttggcccgagtactgggctggggctcagcctgcgatgacgacacccagctcccccagatcttggagaagttggagagagccagcaccaagatgctggacaggtggagcgtcatggcatacgaggccaagctcccccggcaggcctcctcctctaccgtcaccgaagacttcagcgaggattccgaggtacagcagattctcttctatgaagactcggttgcagcccacctttctaaaatcctcacctcggaccagcactcggtggtcatctcctcggccaaagtgctctgtgagacggtgaaggacttcgtggcacgggtggggaaggcctatgagaagacgaccgagagctcggaggagtcagaggtcatggccaagaagtgctctgtcctgaaagagaagctggattcccttctcaagaccttggacgatgagtcccaggcctcgtcctctctgcccaacccgccccccaccattgccgaggaggctgaagatggagatgggtcgggcagcatctgcggttccaccggagaccgcttggtggcatcagcttgcccggcccggccgcagatattccggcctcgagaacagctcatgctgagagccaacagcctgaagaaagcaattcgtcagatcatagaacacacagaaaaagctgtcgatgagcagaatgcccagacccaggagcaggagggcttcgtcctgggcctctctgagtcagaggagaagatggaccacagagtgtgcccaccactgtcccacagcgagagcttcggggtccccaaggggaggagccagcgcaaagtgtcgaaatctccgtgtgaaaagctgatcagcaaagggagtctgtccctaggcagttctgcttcccttccgccccagccgggaagccgggacggcttgcctgcgctcaacaccaagatcctgtacccaaatgtccgggctggaatgtctggttccttacccggtggctcagtcatcagtcgcctgttaattaatgctgatcccttcaactctgaaccagaaaccctagagtattacacggagaaatgtgtcatgaacaactattttggcattggcctggatgcgaagatatccctggactttaacaacaagcgcgatgagcacccagagaagtgcaggagccgaaccaagaacatgatgtggtatggagttcttggaaccaaagagttgctgcacagaacctacaagaacctggagcaaaaggtcttgctggagtgtgacgggcgacccatcccactccccagtcttcagggaattgctgtccttaacattcccagctatgccggaggaaccaacttctgggggggtaccaaggaagatgatactttcgcagctccatcattcgatgacaagattctggaggtggtcgccgtgttcggcagcatgcagatggccgtctctcgagtcatcaggctacagcatcatcggatcgcccagtgtcgcacggtgaagatctccatccttggggatgagggcgtgcctgtgcaggtggacggagaggcctgggtccagccgccagggtacattcggattgtccacaagaaccgggcacagacactgaccagagacagggcatttgagagcaccctgaagtcctgggaagacaagcagaagtgcgagctgccccgccctccatcctgttccctgcacccggagatgctgtccgaggaggaggccacccagatggaccagtttgggcaggcagcaggggtcctcattcacagtatccgagaaatagctcagtctcaccgggacatggagcaggaactggcccacgccgtcaatgccagctccaagtccatggaccgtgtgtatggcaagcccagaaccacagaggggctcaactgcagcttcgtcctggaaatggtgaataacttcagagctctgcgcagtgagacggagctgctgctgtctgggaagatggccctgcagctggatccgcctcagaaggagcagctggggagtgctcttgccgagatggaccgacagctcaggaggctggcagacaccccgtggctctgccagtccgcagagcccggcgacgaagagagtgtgatgctggatcttgccaagcgcagtcgcagtggtaaattccgcctcgtgaccaagtttaaaaaggagaaaaacaacaagaacaaagaagctcacagtagcctgggagccccggttcacctctgggggacagaggaggttgctgcctggctggagcacctcagtctctgtgagtataaggacatcttcacacggcacgacatccggggctctgagctcctgcacctggagcggagggacctcaaggacctgggcgtgaccaaggtgggccacatgaagaggatcctgtgtggcatcaaggagctgagccgcagcgcccccgccgtcgaggcctag

SEQ ID NO: 338 - protein, 1195 aa, Homo sapiens
  Q16760
PPEESSDSEPEAEPGSPQKLIRKVSTSGQIRQKTIIKEGMLTKQNNSFQRSKRRYFKLRGRTLYYAKTAKSIIFDEVDLTDASVAESSTKNVNNSFTVITPCRKLILCADNRKEMEDWIAALKTVQNREHFEPTQYSMDHFSGMHNWYACSHARPTYCNVCREALSGVTSHGLSCEVCKFKAHKRCAVRATNNCKWTTLASIGKDIIEDADGIAMPHQWLEGNLPVSAKCTVCDKTCGSVLRLQDWRCLWCKAMVHTSCKESLLTKCPLGLCKVSVIPPTALNSIDSDGFWKASCPPSCTSPLLVFVNSKSGDNQGVKFLRRFKQLLNPAQVFDLMNGGPHLGLRLFQKFDTFRILVCGGDGSVGWVLSEIDSLNLHKQCQLGVLPLGTGNDLARVLGWGSACDDDTQLPQILEKLERASTKMLDRWSVMAYEAKLPRQASSSTVTEDFSEDSEVQQILFYEDSVAAHLSKILTSDQHSVVISSAKVLCETVKDFVARVGKAYEKTTESSEESEVMAKKCSVLKEKLDSLLKTLDDESQASSSLPNPPPTIAEEAEDGDGSGSICGSTGDRLVASACPARPQIFRPREQLMLRANSLKKAIRQIIEHTEKAVDEQNAQTQEQEGFVLGLSESEEKMDHRVCPPLSHSESFGVPKGRSQRKVSKSPCEKLISKGSLSLGSSASLPPQPGSRDGLPALNTKILYPNVRAGMSGSLPGGSVISRLLINADPFNSEPETLEYYTEKCVMNNYFGIGLDAKISLDFNNKRDEHPEKCRSRTKNMMWYGVLGTKELLHRTYKNLEQKVLLECDGRPIPLPSLQGIAVLNIPSYAGGTNFWGGTKEDDTFAAPSFDDKILEVVAVFGSMQMAVSRVIRLQHHRIAQCRTVKISILGDEGVPVQVDGEAWVQPPGYIRIVHKNRAQTLTRDRAFESTLKSWEDKQKCELPRPPSCSLHPEMLSEEEATQMDQFGQAAGVLIHSIREIAQSHRDMEQELAHAVNASSKSMDRVYGKPRTTEGLNCSFVLEMVNNFRALRSETELLLSGKMALQLDPPQKEQLGSALAEMDRQLRRLADTPWLCQSAEPGDEESVMLDLAKRSRSGKFRLVTKFKKEKNNKNKEAHSSLGAPVHLWGTEEVAAWLEHLSLCEYKDIFTRHDIRGSELLHLERRDLKDLGVTKVGHMKRILCGIKELSRSAPAVEA

SEQ ID NO: 339 - DNA, 1173 bp, Homo sapiens
  AL022237
atgagcgtccgggtcgcacgggtagcgtgggtcaggggcttgggcgccagctaccgccgcggcgcctcgagcttcccggtgcctccgccgggcgcccagggtgtagcggagctgctgcgagatgcgaccggggcggaggaggaggcgccctgggcggcgacggagcggcgaatgccgggccagtgctccgtgctgctcttcccgggccagggcagccaggtggtgggcatgggccgcggtctgctcaactacccgcgcgtccgcgaactctacgccgccgcccgccgcgtgctgggctacgacctgctggaactgagcctgcacgggccgcaggagaccctggaccgcaccgtgcactgtcagcccgcgatcttcgtggcatcgctggccgctgtcgagaaactacatcacctgcagccctcggtgattgagaactgtgttgctgctgctggattcagtgtgggagagtttgcagccctagtgtttgccggagccatggaatttgctgaaggtttgtatgcagtgaaaatccgagctgaggccatgcaggaagcttcagaagctgtccccagtgggatgctgtctgtcctcggccagcctcagtccaagttcaacttcgcctgtttggaagcccgggaacactgcaagtctttaggcatagagaaccccgtatgtgaagtgtccaactacctctttccagattgcagggtgatttcaggacaccaagaggctctacggtttctccagaagaattcctctaagtttcatttcagacgcaccaggatgttgccggttagtggcgcattccacacccgcctcatggagccagccgtggagcccctgacgcaagctttaaaggcagtcgacattaagaagcctctggtttctgtctactccaacgtccacgcgcatagatacaggcatcccgggcacatccacaagctgctggcccagcagctggtctccccagtgaagtgggagcagacgatgcatgccatatacgaaaggaaaaagggcagggggttcccccaaactttcgaagtaggccctggcaggcagctgggagccatcctgaagagctgtaacatgcaggcctggaagtcctacagcgccgtggatgtgctgcagaccctcgaacatgtggacctggaccctcaggagcccccgagatga

SEQ ID NO: 340 - protein, 390 aa, Homo sapiens
  O95510
MSVRVARVAWVRGLGASYRRGASSFPVPPPGAQGVAELLRDATGAEEEAPWAATERRMPGQCSVLLFPGQGSQVVGMGRGLLNYPRVRELYAAARRVLGYDLLELSLHGPQETLDRTVHCQPAIFVASLAAVEKLHHLQPSVIENCVAAAGFSVGEFAALVFAGAMEFAEGLYAVKIRAEAMQEASEAVPSGMLSVLGQPQSKFNFACLEAREHCKSLGIENPVCEVSNYLFPDCRVISGHQEALRFLQKNSSKFHFRRTRMLPVSGAFHTRLMEPAVEPLTQALKAVDIKKPLVSVYSNVHAHRYRHPGHIHKLLAQQLVSPVKWEQTMHAIYERKKGRGFPQTFEVGPGRQLGAILKSCNMQAWKSYSAVDVLQTLEHVDLDPQEPPR

SEQ ID NO: 341 - DNA, 1932 bp, Homo sapiens
  AK000759
atgtgtggcatttgttgttctgtaaacttttctgctgagcatttcagtcaagatttaaaagaggacttactatataatcttaaacagcggggacccaatagtagtaaacaattgttaaagtctgatgttaactaccagtgtttattttctgctcacgtcctacacttgaggggtgttttgactacccagcctgtggaagatgaaagaggcaatgtgtttctatggaatggagaaatttttagtggaataaaggttgaagctgaagagaatgacactcaaattttgtttaattatctttcctcctgtaagaatgaatctgagattttgtcactcttctcagaagtacaaggtccctggtcatttatatattatcaagcatctagtcattatttatggtttggtagggatttttttggtcgccgtagcttgctttggcattttagtaatttgggcaagagtttctgcctctcttcagttggcacccaaacatctggattggcaaatcagtggcaagaagttccagcatctggacttttcagaattgatcttaagtctactgtcatttccagatgcattattttacaactgtatccttggaaatatatttctagggagaatattattgaagaaaatgttaatagcctgagtcaaatttcagcagacttaccagcatttgtatcagtggtagcaaatgaagccaaactgtatcttgaaaaacctgttgttcctttaaatatgatgttgccacaagctgcattggagactcattgcagtaatatttccaatgtgccacctacaagagagatacttcaagtctttcttactgatgtacacatgaaggaagtaattcagcagttcattgatgtcctgagtgtagcagtcaagaaacgtgtcttgtgtttacctagggatgaaaacctgacagcaaatgaagttttgaaaacgtgtgataggaaagcaaatgttgcaatcctgttttctgggggcattgattccatggttattgcaacccttgctgaccgtcatattcctttagatgaaccaattgatcttcttaatgtagctttcatagctgaagaaaagaccatgccaactacctttaacagagaagggaataaacagaaaaataaatgtgaaataccttcagaagaattctctaaagatgttgctgctgctgctgctgacagtcctaataaacatgtcagtgtaccagatcgaatcacaggaagggcgggactaaaggaactacaagctgttagcccttcccgaatttggaattttgttgaaattaatgtttctatggaagaactgcagaaattaagaagaactcgaatatgtcacttaattcggccattggatacagttttggatgatagcattggctgtgcagtctggtttgcttctagaggaattggttggttagtggcccaggaaggagtgaaatcctatcagagcaatgcaaaggtagttctcactggaattggtgcagatgagcaacttgcaggttattctcgtcatcgtgtccgctttcagtcgcatgggctggaaggattgaataaggaaataatgatggaactgggtcgaatttcttctagaaatcttggtcgtgatgacagagttattggtgatcatggaaaagaagcaagatttcctttcctggatgaaaatgttgtctcctttctaaattctctgccgatttgggaaaaagcaaacttgactttaccccgaggaattggtgaaaaattacttttacgccttgcagctgtggaacttggtcttacagcctctgctcttctgcccaaacgggccatgcagtttggatcaagaattgcaaaaatggaaaaaattaatgaaaaggcatctgataaatgtggacggctccaaatcatgtccttagaaaatctttctattgaaaaggagactaaattgtaa

SEQ ID NO: 342 - protein, 643 aa, Homo sapiens
  Q9NWL6
MCGICCSVNFSAEHFSQDLKEDLLYNLKQRGPNSSKQLLKSDVNYQCLFSAHVLHLRGVLTTQPVEDERGNVFLWNGEIFSGIKVEAEENDTQILFNYLSSCKNESEILSLFSEVQGPWSFIYYQASSHYLWFGRDFFGRRSLLWHFSNLGKSFCLSSVGTQTSGLANQWQEVPASGLFRIDLKSTVISRCIILQLYPWKYISRENIIEENVNSLSQISADLPAFVSVVANEAKLYLEKPVVPLNMMLPQAALETHCSNISNVPPTREILQVFLTDVHMKEVIQQFIDVLSVAVKKRVLCLPRDENLTANEVLKTCDRKANVAILFSGGIDSMVIATLADRHIPLDEPIDLLNVAFIAEEKTMPTTFNREGNKQKNKCEIPSEEFSKDVAAAAADSPNKHVSVPDRITGRAGLKELQAVSPSRIWNFVEINVSMEELQKLRRTRICHLIRPLDTVLDDSIGCAVWFASRGIGWLVAQEGVKSYQSNAKVVLTGIGADEQLAGYSRHRVRFQSHGLEGLNKEIMMELGRISSRNLGRDDRVIGDHGKEARFPFLDENVVSFLNSLPIWEKANLTLPRGIGEKLLLRLAAVELGLTASALLPKRAMQFGSRIAKMEKINEKASDKCGRLQIMSLENLSIEKETKL

SEQ ID NO: 343 - DNA, 4491 bp, Homo sapiens
  D86983
agccggccgtggtggctccgtgcgtccgagcgtccgtccgcgccgtcggccatggccaagcgctccaggggccccgggcgccgctgcctgttggcgctcgtgctgttctgcgcctgggggacgctggccgtggtggcccagaagccgggcgcagggtgtccgagccgctgcctgtgcttccgcaccaccgtgcgctgcatgcatctgctgctggaggccgtgcccgccgtggcgccgcagacctccatcctagatcttcgctttaacagaatcagagagatccaacctggggcattcaggcggctgaggaacttgaacacattgcttctcaataataatcagatcaagaggatacctagtggagcatttgaagacttggaaaatttaaaatatctctatctgtacaagaatgagatccagtcaattgacaggcaagcatttaagggacttgcctctctagagcaactatacctgcactttaatcagatagaaactttggacccagattcgttccagcatctcccgaagctcgagaggctatttttgcataacaaccggattacacatttagttccagggacatttaatcacttggaatctatgaagagattgcgactggactcaaacacacttcactgcgactgtgaaatcctgtggttggcggatttgctgaaaacctacgcggagtcggggaacgcgcaggcagcggccatctgtgaatatcccagacgcatccagggacgctcagtggcaaccatcaccccggaagagctgaactgtgaaaggccccggatcacctccgagccccaggacgcagatgtgacctcggggaacaccgtgtacttcacctgcagagccgaaggcaaccccaagcctgagatcatctggctgcgaaacaataatgagctgagcatgaagacagattcccgcctaaacttgctggacgatgggaccctgatgatccagaacacacaggagacagaccagggtatctaccagtgcatggcaaagaacgtggccggagaggtgaagacgcaagaggtgaccctcaggtacttcgggtctccagctcgacccacttttgtaatccagccacagaatacagaggtgctggttggggagagcgtcacgctggagtgcagcgccacaggccaccccccgccgcggatctcctggacgagaggtgaccgcacacccttgccagttgacccgcgggtgaacatcacgccttctggcgggctttacatacagaacgtcgtacagggggacagcggagagtatgcgtgctctgcgaccaacaacattgacagcgtccatgccaccgctttcatcatcgtccaggctcttcctcagttcactgtgacgcctcaggacagagtcgttattgagggccagaccgtggatttccagtgtgaagccaagggcaacccgccgcccgtcatcgcctggaccaagggagggagccagctctccgtggaccggcggcacctggtcctgtcatcgggaacacttagaatctctggtgttgccctccacgaccagggccagtacgaatgccaggctgtcaacatcatcggctcccagaaggtcgtggcccacctgactgtgcagcccagagtcaccccagtgtttgccagcattcccagcgacacaacagtggaggtgggcgccaatgtgcagctcccgtgcagctcccagggcgagcccgagccagccatcacctggaacaaggatggggttcaggtgacagaaagtggaaaatttcacatcagccctgaaggattcttgaccatcaatgacgttggccctgcagacgcaggtcgctatgagtgtgtggcccggaacaccattgggtcggcctcggtgagcatggtgctcagtgtgaacgttcctgacgtcagtcgaaatggagatccgtttgtagctacctccatcgtggaagcgattgcgactgttgacagagctataaactcaacccgaacacatttgtttgacagccgtcctcgttctccaaatgatttgctggccttgttccggtatccgagggatccttacacagttgaacaggcacgggcgggagaaatctttgaacggacattgcagctcattcaggagcatgtacagcatggcttgatggtcgacctcaacggaacaagttaccactacaacgacctggtgtctccacagtacctgaacctcatcgcaaacctgtcgggctgtaccgcccaccggcgcgtgaacaactgctcggacatgtgcttccaccagaagtaccggacgcacgacggcacctgtaacaacctgcagcaccccatgtggggcgcctcgctgaccgccttcgagcgcctgctgaaatccgtgtacgagaatggcttcaacacccctcggggcatcaacccccaccgactgtacaacgggcacgcccttcccatgccgcgcctggtgtccaccaccctgatcgggacggagaccgtcacacccgacgagcagttcacccacatgctgatgcagtggggccagttcctggaccacgacctcgactccacggtggtggccctgagccaggcacgcttctccgacggacagcactgcagcaacgtgtgcagcaacgaccccccctgcttctctgtcatgatcccccccaatgactcccgggccaggagcggggcccgctgcatgttcttcgtgcgctccagccctgtgtgcggcagcggcatgacttcgctgctcatgaactccgtgtacccgcgggagcagatcaaccagctcacctcctacatcgacgcatccaacgtgtacgggagcacggagcatgaggcccgcagcatccgcgacctggccagccaccgcggcctgctgcggcagggcatcgtgcagcggtccgggaagccgctgctccccttcgccaccgggccgcccacggagtgcatgcgggacgagaacgagagccccatcccctgcttcctggccggggaccaccgcgccaacgagcagctgggcctgaccagcatgcacacgctgtggttccgcgagcacaaccgcattgccacggagctgctcaagctgaacccgcactgggacggcgacaccatctactatgagaccaggaagatcgtgggtgcggagatccagcacatcacctaccagcactggctcccgaagatcctgggggaggtgggcatgaggacgctgggagagtaccacggctacgaccccggcatcaatgctggcatcttcaacgccttcgccaccgcggccttcaggtttggccacacgcttgtcaacccactgctttaccggctggacgagaacttccagcccattgcacaagatcacctcccccttcacaaagctttcttctctcccttccggattgtgaatgagggcggcatcgatccgcttctcagggggctgttcggggtggcggggaaaatgcgtgtgccctcgcagctgctgaacacggagctcacggagcggctgttctccatggcacacacggtggctctggacctggcggccatcaacatccagcggggccgggaccacgggatcccaccctaccacgactacagggtctactgcaatctatcggcggcacacacgttcgaggacctgaaaaatgagattaaaaaccctgagatccgggagaaactgaaaaggttgtatggctcgacactcaacatcgacctgtttccggcgctcgtggtggaggacctggtgcctggcagccggctgggccccaccctgatgtgtcttctcagcacacagttcaagcgcctgcgagatggggacaggttgtggtatgagaaccctggggtgttctccccggcccagctgactcagatcaagcagacgtcgctggccaggatcctatgcgacaacgcggacaacatcacccgggtgcagagcgacgtgttcagggtggcggagttccctcacggctacggcagctgtgacgagatccccagggtggacctccgggtgtggcaggactgctgtgaagactgtaggaccagggggcagttcaatgccttttcctatcatttccgaggcagacggtctcttgagttcagctaccaggaggacaagccgaccaagaaaacaagaccacggaaaatacccagtgttgggagacagggggaacatctcagcaacagcacctcagccttcagcacacgctcagatgcatctgggacaaatgacttcagagagtttgttctggaaatgcagaagaccatcacagacctcagaacacagataaagaaacttgaatcacggctcagtaccacagagtgcgtggatgccgggggcgaatctcacgccaacaacaccaagtggaaaaaagatgcatgcaccatttgtgaatgcaaagacgggcaggtcacctgcttcgtggaagcttgcccccctgccacctgtgctgtccccgtgaacatcccaggggcctgctgtccagtctgcttacagaagagggcggaggaaaagccctag

SEQ ID NO: 344 - protein, 1496 aa, Homo sapiens
  Q92626
SRPWWLRASERPSAPSAMAKRSRGPGRRCLLALVLFCAWGTLAVVAQKPGAGCPSRCLCFRTTVRCMHLLLEAVPAVAPQTSILDLRFNRIREIQPGAFRRLRNLNTLLLNNNQIKRIPSGAFEDLENLKYLYLYKNEIQSIDRQAFKGLASLEQLYLHFNQIETLDPDSFQHLPKLERLFLHNNRITHLVPGTFNHLESMKRLRLDSNTLHCDCEILWLADLLKTYAESGNAQAAAICEYPRRIQGRSVATITPEELNCERPRITSEPQDADVTSGNTVYFTCRAEGNPKPEIIWLRNNNELSMKTDSRLNLLDDGTLMIQNTQETDQGIYQCMAKNVAGEVKTQEVTLRYFGSPARPTFVIQPQNTEVLVGESVTLECSATGHPPPRISWTRGDRTPLPVDPRVNITPSGGLYIQNVVQGDSGEYACSATNNIDSVHATAFIIVQALPQFTVTPQDRVVIEGQTVDFQCEAKGNPPPVIAWTKGGSQLSVDRRHLVLSSGTLRISGVALHDQGQYECQAVNIIGSQKVVAHLTVQPRVTPVFASIPSDTTVEVGANVQLPCSSQGEPEPAITWNKDGVQVTESGKFHISPEGFLTINDVGPADAGRYECVARNTIGSASVSMVLSVNVPDVSRNGDPFVATSIVEAIATVDRAINSTRTHLFDSRPRSPNDLLALFRYPRDPYTVEQARAGEIFERTLQLIQEHVQHGLMVDLNGTSYHYNDLVSPQYLNLIANLSGCTAHRRVNNCSDMCFHQKYRTHDGTCNNLQHPMWGASLTAFERLLKSVYENGFNTPRGINPHRLYNGHALPMPRLVSTTLIGTETVTPDEQFTHMLMQWGQFLDHDLDSTVVALSQARFSDGQHCSNVCSNDPPCFSVMIPPNDSRARSGARCMFFVRSSPVCGSGMTSLLMNSVYPREQINQLTSYIDASNVYGSTEHEARSIRDLASHRGLLRQGIVQRSGKPLLPFATGPPTECMRDENESPIPCFLAGDHRANEQLGLTSMHTLWFREHNRIATELLKLNPHWDGDTIYYETRKIVGAEIQHITYQHWLPKILGEVGMRTLGEYHGYDPGINAGIFNAFATAAFRFGHTLVNPLLYRLDENFQPIAQDHLPLHKAFFSPFRIVNEGGIDPLLRGLFGVAGKMRVPSQLLNTELTERLFSMAHTVALDLAAINIQRGRDHGIPPYHDYRVYCNLSAAHTFEDLKNEIKNPEIREKLKRLYGSTLNIDLFPALVVEDLVPGSRLGPTLMCLLSTQFKRLRDGDRLWYENPGVFSPAQLTQIKQTSLARILCDNADNITRVQSDVFRVAEFPHGYGSCDEIPRVDLRVWQDCCEDCRTRGQFNAFSYHFRGRRSLEFSYQEDKPTKKTRPRKIPSVGRQGEHLSNSTSAFSTRSDASGTNDFREFVLEMQKTITDLRTQIKKLESRLSTTECVDAGGESHANNTKWKKDACTICECKDGQVTCFVEACPPATCAVPVNIPGACCPVCLQKRAEEKP

SEQ ID NO: 345 - DNA, 1266 bp, Homo sapiens
  M91432
atggcagcggggttcgggcgatgctgcagggtcctgagaagtatttctcgttttcattggagatcacagcatacaaaagccaatcgacaacgtgaaccaggattaggatttagttttgagttcaccgaacagcagaaagaatttcaagctactgctcgtaaatttgccagagaggaaatcatcccagtggctgcagaatatgataaaactggtgaatatccagtccccctaattagaagagcctgggaacttggtttaatgaacacacacattccagagaactgtggaggtcttggacttggaacttttgatgcttgtttaattagtgaagaattggcttatggatgtacaggggttcagactgctattgaaggaaattctttggggcaaatgcctattattattgctggaaatgatcaacaaaagaagaagtatttggggagaatgactgaggagccattgatgtgtgcttattgtgtaacagaacctggagcaggctctgatgtagctggtataaagaccaaagcagaaaagaaaggagatgagtatattattaatggtcagaagatgtggataaccaacggaggaaaagctaattggtattttttattggcacgttctgatccagatcctaaagctcctgctaataaagcctttactggattcattgtggaagcagataccccaggaattcagattgggagaaaggaattaaacatgggccagcgatgttcagatactagaggaattgtcttcgaagatgtgaaagtgcctaaagaaaatgttttaattggtgacggagctggtttcaaagttgcaatgggagcttttgataaaaccagacctgtagtagctgctggtgctgttggattagcacaaagagctttggatgaagctaccaagtatgccctggaaaggaaaactttcggaaagctacttgtagagcaccaagcaatatcatttatgctggctgaaatggcaatgaaagttgaactagctagaatgagttaccagagagcagcttgggaggttgattctggtcgtcgaaatacctattatgcttctattgcaaaggcatttgctggagatattgcaaatcagttagctactgatgctgtgcagatacttggaggcaatggatttaatacagaatatcctgtagaaaaactaatgagggatgccaaaatctatcagatttatgaaggtacttcacaaattcaaagacttattgtagcccgtgaacacattgacaagtacaaaaattaa

SEQ ID NO: 346 - protein, 421 aa, Homo sapiens
  P11310
MAAGFGRCCRVLRSISRFHWRSQHTKANRQREPGLGFSFEFTEQQKEFQATARKFAREEIIPVAAEYDKTGEYPVPLIRRAWELGLMNTHIPENCGGLGLGTFDACLISEELAYGCTGVQTAIEGNSLGQMPIIIAGNDQQKKKYLGRMTEEPLMCAYCVTEPGAGSDVAGIKTKAEKKGDEYIINGQKMWITNGGKANWYFLLARSDPDPKAPANKAFTGFIVEADTPGIQIGRKELNMGQRCSDTRGIVFEDVKVPKENVLIGDGAGFKVAMGAFDKTRPVVAAGAVGLAQRALDEATKYALERKTFGKLLVEHQAISFMLAEMAMKVELARMSYQRAAWEVDSGRRNTYYASIAKAFAGDIANQLATDAVQILGGNGFNTEYPVEKLMRDAKIYQIYEGTSQIQRLIVAREHIDKYKN

SEQ ID NO: 347 - DNA, 1584 bp, Homo sapiens
  AB017642
atgtccgaagactcgagcgccctgccctggtccatcaacagggacgattacgagctgcaggaggtgatcgggagtggagcaactgctgtagtccaagcagcttattgtgcccctaaaaaggagaaagtggcaatcaaacggataaaccttgagaaatgtcaaactagcatggatgaactcctgaaagaaattcaagccatgagtcaatgccatcatcctaatattgtatcttactacacatcttttgtggtaaaagatgagctgtggcttgtcatgaagctgctaagtggaggttctgttctggatattattaagcacattgtggcaaaaggggaacacaaaagtggagtcctagatgaatctaccattgctacgatactccgagaagtactggaagggctggaatatctgcataaaaatggacagatccacagagatgtgaaagctggaaacattcttcttggagaagatggctcagtacagattgcagactttggggttagtgcttttttagcaactggtggtgatattacccgaaataaagtgagaaagacctttgttggcaccccttgttggatggcacctgaagttatggaacaggtccgtggttatgatttcaaagctgatatttggagttttggaattacagcaattgaattggctacaggggcggctccttatcataaatatccaccaatgaaggttttaatgctgacactgcagaacgatcctccttctttggaaactggtgttcaagataaagaaatgctgaaaaaatatggaaaatcatttagaaaaatgatttcattgtgccttcaaaaagatccagaaaaaagaccaacagcagcagaactattaaggcacaaatttttccagaaagcaaagaataaagaatttcttcaagaaaaaacattgcagagagcaccaaccatttctgaaagagcaaaaaaggttcggagagtaccaggttccagtgggcgtcttcataagacagaggatggaggctgggagtggagtgatgatgaatttgatgaagaaagtgaggaagggaaagcagcaatttcacaactcaggtctccccgagtgaaagaatcaatatcaaattctgagctctttccaacaactgatcctgtgggtactttgctccaagttccagaacagatctctgctcatctacctcagccagctgggcagattgctacacagccaactcaagtctctctcccacccaccgcagagccagcaaaaacagctcaggctttgtcttcaggatcaggttcacaagaaaccaagatcccaatcagtctagtactaagattaaggaattccaaaaaagaactaaatgatattcgatttgaatttactcctgggagagatacagcagagggtgtctctcaggaactcatttctgctggcctggtcgacggaagggatttagtaatagtggcagctaatttgcagaaaattgtggaagaacctcagtcaaatcgatctgtcactttcaaactggcatctggtgtcgaaggctcagatattcctgatgatggtaaactgataggatttgcccagctcagcatcagctaa

SEQ ID NO: 348 - protein, 527 aa, Homo sapiens
  O95747
MSEDSSALPWSINRDDYELQEVIGSGATAVVQAAYCAPKKEKVAIKRINLEKCQTSMDELLKEIQAMSQCHHPNIVSYYTSFVVKDELWLVMKLLSGGSVLDIIKHIVAKGEHKSGVLDESTIATILREVLEGLEYLHKNGQIHRDVKAGNILLGEDGSVQIADFGVSAFLATGGDITRNKVRKTFVGTPCWMAPEVMEQVRGYDFKADIWSFGITAIELATGAAPYHKYPPMKVLMLTLQNDPPSLETGVQDKEMLKKYGKSFRKMISLCLQKDPEKRPTAAELLRHKFFQKAKNKEFLQEKTLQRAPTISERAKKVRRVPGSSGRLHKTEDGGWEWSDDEFDEESEEGKAAISQLRSPRVKESISNSELFPTTDPVGTLLQVPEQISAHLPQPAGQIATQPTQVSLPPTAEPAKTAQALSSGSGSQETKIPISLVLRLRNSKKELNDIRFEFTPGRDTAEGVSQELISAGLVDGRDLVIVAANLQKIVEEPQSNRSVTFKLASGVEGSDIPDDGKLIGFAQLSIS

SEQ ID NO: 349 - DNA, 4491 bp, Homo sapiens; identical to SEQ ID NO: 343
  D86983

SEQ ID NO: 350 - protein, 1496 aa, Homo sapiens; identical to SEQ ID NO: 344
  Q92626

SEQ ID NO: 351 - DNA, 1320 bp, Homo sapiens
  BC014947
atgtggctggaccatcgagcagtcagtcaagttaacaggatcaatgagaccaagcacagtgtcctccagtacgtcgggggggtgatgtctgtggaaatgcaggccccgaaacttctgtggctgaaagagaacttgagagagatttgctgggataaggcgggacatttctttgatctcccggacttcttatcgtggaaggcaacaggtgtcacagcacggtctctctgctccctggtgtgtaagtggacatattcagcagagaaaggctgggacgacagtttctggaaaatgattggtttggaagactttgttgcagataattacagcaaaataggaaaccaagtgctacctcctggagcttctcttggaaatgggctcacaccagaggcagcaagagaccttggccttctccctgggattgcggtcgcagcttcactcattgatgcccatgcaggaggactaggagtgattggggcagatgtgagagggcacggcctcatctgtgaggggcagccagtgacgtcacggctggctgtcatctgtggaacgtcttcttgtcacatggggatcagcaaagacccgatttttgtaccaggcgtctgggggccttatttctcagccatggtacctgggttctggctgaatgaaggtggtcagagcgttactggaaaattgatagaccacatggtacaaggccatgctgcttttccagaactacaagtaaaggccacagccagatgccagagtatatatgcatatttgaacagtcacctggatctgattaagaaggctcagcctgtgggtttccttactgttgatttacatgtttggccagatttccatggcaaccggtctcccttagcagatctgacactaaagggcatggtcaccggattgaaactgtctcaggaccttgatgatcttgccattctctacctggccacagttcaagccattgctttggggactcgcttcattatagaagccatggaggcagcagggcactcaatcagtactcttttcctatgtggaggcctcagcaagaatcccctttttgtgcaaatgcatgcggacattactggcatgcctgtggtcctgtcgcaagaggtggagtccgttcttgtgggtgctgctgttctgggtgcctgtgcctcaggggatttcgcttctgtacaggaagcaatggcaaaaatgagcaaagttgggaaagttgtgttcccgagactacaggataaaaaatactatgataagaaataccaagtattcctgaagctggttgaacaccagaaggagtatttggcgatcatgaatgatgactga

SEQ ID NO: 352 - protein, 439 aa, Homo sapiens
  Q96C11
MWLDHRAVSQVNRINETKHSVLQYVGGVMSVEMQAPKLLWLKENLREICWDKAGHFFDLPDFLSWKATGVTARSLCSLVCKWTYSAEKGWDDSFWKMIGLEDFVADNYSKIGNQVLPPGASLGNGLTPEAARDLGLLPGIAVAASLIDAHAGGLGVIGADVRGHGLICEGQPVTSRLAVICGTSSCHMGISKDPIFVPGVWGPYFSAMVPGFWLNEGGQSVTGKLIDHMVQGHAAFPELQVKATARCQSIYAYLNSHLDLIKKAQPVGFLTVDLHVWPDFHGNRSPLADLTLKGMVTGLKLSQDLDDLAILYLATVQAIALGTRFIIEAMEAAGHSISTLFLCGGLSKNPLFVQMHADITGMPVVLSQEVESVLVGAAVLGACASGDFASVQEAMAKMSKVGKVVFPRLQDKKYYDKKYQVFLKLVEHQKEYLAIMNDD

SEQ ID NO: 353 - DNA, 2223 bp, Homo sapiens
  U08316
atgccgctggcgcagctggcggacccgtggcagaagatggctgtggagagcccgtccgacagcgctgagaatggacagcaaattatggatgaacctatgggagaggaggagattaacccacaaactgaagaagtcagtatcaaagaaattgcaatcacacatcatgtaaaggaaggacatgaaaaggcagatccttcccagtttgaacttttaaaagtattagggcagggatcatttggaaaggttttcttagttaaaaaaatctcaggctctgatgctaggcagctttatgccatgaaggtattgaagaaggccacactgaaagttcgagaccgagttcggacaaaaatggaacgtgatatcttggtagaggttaatcatccttttattgtcaagttgcattatgcttttcaaactgaagggaagttgtatcttattttggattttctcaggggaggagatttgtttacacgcttatccaaagaggtgatgttcacagaagaagatgtcaaattctacttggctgaacttgcacttgctttagaccatctacatagcctgggaataatttatagagacttaaaaccagaaaatatacttcttgatgaagaaggtcacatcaagttaacagatttcggcctaagtaaagagtctattgaccatgaaaagaaggcatattctttttgtggaactgtggagtatatggctccagaagtagttaatcgtcgaggtcatactcagagtgctgactggtggtcttttggtgtgttaatgtttgaaatgcttactggtacactccctttccaaggaaaagatcgaaaagaaacaatgactatgattcttaaagccaaacttggaatgccacagtttttgagtcctgaagcgcagagtcttttacgaatgcttttcaagcgaaatcctgcaaacagattaggtgcaggaccagatggagttgaagaaattaaaagacattcatttttctcaacgatagactggaataaactgtatagaagagaaattcatccgccatttaaacctgcaacgggcaggcctgaagatacattctattttgatcctgagtttactgcaaaaactcccaaagattcacctggcattccacctagtgctaatgcacatcagctttttcgggggtttagttttgttgctattacctcagatgatgaaagccaagctatgcagacagttggtgtacattcaattgttcagcagttacacaggaacagtattcagtttactgatggatatgaagtaaaagaagatattggagttggctcctactctgtttgcaagagatgtatacataaagctacaaacatggagtttgcagtgaagattattgataaaagcaagagagacccaacagaagaaattgaaattcttcttcgttatggacagcatccaaacattatcactctaaaggatgtatatgatgatggaaagtatgtgtatgtagtaacagaacttatgaaaggaggtgaattgctggataaaattcttagacaaaaatttttctctgaacgagaggccagtgctgtcctgttcactataactaaaaccgttgaatatcttcacgcacaaggggtggttcatcgagacttgaaacctagcaacattctttatgtggatgaatctggtaatccggaatctattcgaatttgtgattttggctttgcaaaacagctgagagcggaaaatggtcttctcatgactccttgttacactgcaaattttgttgcaccagaggttttaaaaagacaaggctatgatgctgcttgtgatatatggagtcttggtgtcctactctatacaatgcttaccggttacactccatttgcaaatggtcctgatgatacaccagaggaaatattggcacgaataggtagcggaaaattctcactcagtggtggttactggaattctgtttcagacacagcaaaggacctggtgtcaaagatgcttcatgtagaccctcatcagagactgactgctgctcttgtgctcagacatccttggatcgtccactgggaccaactgccacaataccaactaaacagacaggatgcaccacatctagtaaagggtgccatggcagctacatattctgctttgaaccgtaatcagtcaccagttttggaaccagtaggccgctctactcttgctcagcggagaggtattaaaaaaatcacctcaacagccctgtga

SEQ ID NO: 354 - protein, 740 aa, Homo sapiens
  P51812
MPLAQLADPWQKMAVESPSDSAENGQQIMDEPMGEEEINPQTEEVSIKEIAITHHVKEGHEKADPSQFELLKVLGQGSFGKVFLVKKISGSDARQLYAMKVLKKATLKVRDRVRTKMERDILVEVNHPFIVKLHYAFQTEGKLYLILDFLRGGDLFTRLSKEVMFTEEDVKFYLAELALALDHLHSLGIIYRDLKPENILLDEEGHIKLTDFGLSKESIDHEKKAYSFCGTVEYMAPEVVNRRGHTQSADWWSFGVLMFEMLTGTLPFQGKDRKETMTMILKAKLGMPQFLSPEAQSLLRMLFKRNPANRLGAGPDGVEEIKRHSFFSTIDWNKLYRREIHPPFKPATGRPEDTFYFDPEFTAKTPKDSPGIPPSANAHQLFRGFSFVAITSDDESQAMQTVGVHSIVQQLHRNSIQFTDGYEVKEDIGVGSYSVCKRCIHKATNMEFAVKIIDKSKRDPTEEIEILLRYGQHPNIITLKDVYDDGKYVYVVTELMKGGELLDKILRQKFFSEREASAVLFTITKTVEYLHAQGVVHRDLKPSNILYVDESGNPESIRICDFGFAKQLRAENGLLMTPCYTANFVAPEVLKRQGYDAACDIWSLGVLLYTMLTGYTPFANGPDDTPEEILARIGSGKFSLSGGYWNSVSDTAKDLVSKMLHVDPHQRLTAALVLRHPWIVHWDQLPQYQLNRQDAPHLVKGAMAATYSALNRNQSPVLEPVGRSTLAQRRGIKKITSTAL

SEQ ID NO: 355 - DNA, 1176 bp, Homo sapiens
  AK021919
atgtctcgggaacccaccccacctctacctggagatatgtctactggtcccatagcagaaagctggtgttacacacaggttaaagtggtaaaattttcctatatgtggaccattaataacttcagtttttgtcgagaggaaatgggtgaagtgttaaaaagttcaacattttcatctggcccaagtgacaaaatgaaatggtgcctgagggtaaacccaaagggattagatgatgaaagtaaagactacttgtccttatatttgcttttagtcagctgccccaaaagtgaagttcgagcaaaattcaaattttcccttctgaatgctaaaagggaagaaacaaaagcaatggaaagccaaagagcatatcgatttgtgcaagggaaggactggggttttaaaaaattcattagaagggactttttgcttgatgaagctaatggtcttttaccagatgacaagcttacattattttgtgaggtgagtgtggtccaagattcagtaaacatatcaggacatactaatacaaatactttgaaggtgcctgagtgtcgtctagcagaagatttaggtaatctctgggaaaacacaagatttacagactgcagttttttcgtgagaggacaagaatttaaagctcataaatctgtgcttgcagctcgatctccagtttttaacgccatgtttgaacatgaaatggaagaaagcaaaaagaatcgagtggaaataaatgatttagaccctgaagtttttaaagaaatgatgagattcatttacacagggagagcaccaaaccttgacaaaatggctgacaacttgttggcagctgcagacaaatatgcactggaacggctgaaggtcatgtgcgaagaagctttgtgtagtaacctctcagtagagaatgttgcagatacccttgtccttgcagatttgcacagtgcagaacagttgaaagcacaagccatagactttattaataggtgcagtgtacttcgacaacttgggtgtaaagatgggaaaaactggaacagcaaccaagcaaccgacataatggaaagtgaacgggatcgccaacattttgataaagaagttatgaaagcctatattgaagaccttaaagaaagagaatctgttcccagctataccaccaaagtgtcttttagccttcaactttga

SEQ ID NO: 356 - protein, 391 aa, Homo sapiens
  Q9HAB2
MSREPTPPLPGDMSTGPIAESWCYTQVKVVKFSYMWTINNFSFCREEMGEVLKSSTFSSGPSDKMKWCLRVNPKGLDDESKDYLSLYLLLVSCPKSEVRAKFKFSLLNAKREETKAMESQRAYRFVQGKDWGFKKFIRRDFLLDEANGLLPDDKLTLFCEVSVVQDSVNISGHTNTNTLKVPECRLAEDLGNLWENTRFTDCSFFVRGQEFKAHKSVLAARSPVFNAMFEHEMEESKKNRVEINDLDPEVFKEMMRFIYTGRAPNLDKMADNLLAAADKYALERLKVMCEEALCSNLSVENVADTLVLADLHSAEQLKAQAIDFINRCSVLRQLGCKDGKNWNSNQATDIMESERDRQHFDKEVMKAYIEDLKERESVPSYTTKVSFSLQL

SEQ ID NO: 357 - DNA, 1125 bp, Homo sapiens
  AJ000644
atgtcaagggttccaagtcctccacctccggcagaaatgtcgagtggccccgtagctgagagttggtgctacacacagatcaaggtagtgaaattctcctacatgtggaccatcaataactttagcttttgccgggaggaaatgggtgaagtcattaaaagttctacattttcatcaggagcaaatgataaactgaaatggtgtttgcgagtaaaccccaaagggttagatgaagaaagcaaagattacctgtcactttacctgttactggtcagctgtccaaagagtgaagttcgggcaaaattcaaattctccatcctgaatgccaagggagaagaaaccaaagctatggagagtcaacgggcatataggtttgtgcaaggcaaagactggggattcaagaaattcatccgtagagattttcttttggatgaggccaacgggcttctccctgatgacaagcttaccctcttctgcgaggtgagtgttgtgcaagattctgtcaacatttctggccagaataccatgaacatggtaaaggttcctgagtgccggctggcagatgagttaggaggactgtgggagaattcccggttcacagactgctgcttgtgtgttgccggccaggaattccaggctcacaaggctatcttagcagctcgttctccggtttttagtgccatgtttgaacatgaaatggaggagagcaaaaagaatcgagttgaaatcaatgatgtggagcctgaagtttttaaggaaatgatgtgcttcatttacacggggaaggctccaaacctcgacaaaatggctgatgatttgctggcagctgctgacaagtatgccctggagcgcttaaaggtcatgtgtgaggatgccctctgcagtaacctgtccgtggagaacgctgcagaaattctcatcctggccgacctccacagtgcagatcagttgaaaactcaggcagtggatttcatcaactatcatgcttcggatgtcttggagacctctgggtggaagtcaatggtggtgtcacatccccacttggtggctgaggcataccgctctctggcttcagcacagtgcccttttctgggacccccacgcaaacgcctgaagcaatcctaa

SEQ ID NO: 358 - protein, 374 aa, Homo sapiens
  O43791
MSRVPSPPPPAEMSSGPVAESWCYTQIKVVKFSYMWTINNFSFCREEMGEVIKSSTFSSGANDKLKWCLRVNPKGLDEESKDYLSLYLLLVSCPKSEVRAKFKFSILNAKGEETKAMESQRAYRFVQGKDWGFKKFIRRDFLLDEANGLLPDDKLTLFCEVSVVQDSVNISGQNTMNMVKVPECRLADELGGLWENSRFTDCCLCVAGQEFQAHKAILAARSPVFSAMFEHEMEESKKNRVEINDVEPEVFKEMMCFIYTGKAPNLDKMADDLLAAADKYALERLKVMCEDALCSNLSVENAAEILILADLHSADQLKTQAVDFINYHASDVLETSGWKSMVVSHPHLVAEAYRSLASAQCPFLGPPRKRLKQS

SEQ ID NO: 359 - DNA, 1584 bp, Homo sapiens
  AB015046
  misc_feature (1556)..(1556): n is uncertain
atggcggagcacgcccctcgccgctgctgcctgggctgggacttcagcacgcagcaggtaaaggttgttgctgttgatgcagagttgaatgtcttctatgaggaaagtgtgcattttgacagagatcttccagaatttgggcatgtacttgatgtgcatggtgttcatgtgcacaaggatgggctgacggtcacttctccagtactaatgtgggtccaggcactggatatcatcttggagaagatgaaggcttcgggcttcgaattctctcaagtcctagccttgtccggggcgggccagcaacacggaagtatatactggaaggctggagcccagcaggcactgacaagcttatcaccagacctccggctacaccagcagcttcaggactgtttctccatcagcgactgcccggtgtggatggactccagcaccacagcccagtgccgccagctggaggctgctgtgggtggtgctcaggctctcagctgcctcacggggtcccgtgcctatgagcgttttacagggaaccaaattgcaaaaatttaccagcagaaccccgaggcctactcacatacagagagaatttctttggtcagtagctttgctgcttccctgttccttggctcttactcccctattgactacagtgatggttctggaatgaatttgttgcagatacaggataaagtctggtcccaggcttgccttggtgcctgtgcacctcatttagaggagaagcttagcccaccagtaccatcatgctcagttgtgggagccatttcttcctacaacgtccagcgctacggatttcctccaggatgcaaagtggtggccttcactggggacaacccagcgtcgctggcaggcatgagactggaggaaggtgacattgcggtcagcctgggcaccagtgacaccctgtttctctggctccaagagcccatgcctgccctggaaggccacatcttctgcaacccggttgactcccagcactacatggcactcctgtgctttaaaaatggctccctcatgagagagaagatccgcaacgagtctgtatcccgttcctggagcgatttctctaaggcactgcagtccacagagatgggcaacggtggaaacctgggtttttattttgatgtaatggagatcacccctgaaattattggacgtcataggtttaacacagaaaaccacaaggttgcagcattccctggggatgtggaggttcgagcactaattgaaggacaattcatggccaagaggattcacgcagaaggcctgggctatcgagtcatgtccaagacaaagattttggccacaggaggagcatctcacaatagagaaatcttacaggtgcttgcagatgtgtttgatgccccggtgtatgttatagacactgccaactcggcctgtgtgggttctgcataccgagcttttcatggtcttgcaggtggaacagatgtgcccttttcagaggttgtgaagttagctccaaatcccagactagctgctaccccaagcccgggagcttctcaggtgagagaccatcngaatttgtttgtagcatttgcattatga

SEQ ID NO: 360 - protein, 527 aa, Homo sapiens
  O75191
  MISC_FEATURE (519)..(519): Xaa is uncertain
MAEHAPRRCCLGWDFSTQQVKVVAVDAELNVFYEESVHFDRDLPEFGHVLDVHGVHVHKDGLTVTSPVLMWVQALDIILEKMKASGFEFSQVLALSGAGQQHGSIYWKAGAQQALTSLSPDLRLHQQLQDCFSISDCPVWMDSSTTAQCRQLEAAVGGAQALSCLTGSRAYERFTGNQIAKIYQQNPEAYSHTERISLVSSFAASLFLGSYSPIDYSDGSGMNLLQIQDKVWSQACLGACAPHLEEKLSPPVPSCSVVGAISSYNVQRYGFPPGCKVVAFTGDNPASLAGMRLEEGDIAVSLGTSDTLFLWLQEPMPALEGHIFCNPVDSQHYMALLCFKNGSLMREKIRNESVSRSWSDFSKALQSTEMGNGGNLGFYFDVMEITPEIIGRHRFNTENHKVAAFPGDVEVRALIEGQFMAKRIHAEGLGYRVMSKTKILATGGASHNREILQVLADVFDAPVYVIDTANSACVGSAYRAFHGLAGGTDVPFSEVVKLAPNPRLAATPSPGASQVRDHXNLFVAFAL

SEQ ID NO: 361 - DNA, 897 bp, Homo sapiens
  X78678
atggaagagaagcagatcctgtgcgtggggctagtggtgctggacgtcatcagcctggtggacaagtaccctaaggaggactcggagataaggtgtttgtcccagagatggcagcgcggaggcaacgcgtccaactcctgcaccgttctctccctgctcggagccccctgtgccttcatgggctcaatggctcctggccatgttgctgattttgtcctggatgacctccgccgctattctgtggacctacgctacacagtctttcagaccacaggctccgtccccatcgccacggtcatcatcaacgaggccagtggtagccgcaccatcctatactatgacaggagcctgccagatgtgtctgctacagactttgagaaggttgatctgacccagttcaagtggatccacattgagggccggaacgcatcggagcaggtgaagatgctgcagcggatagacgcacacaacaccaggcagcctccagagcagaagatccgggtgtccgtggaggtggagaagccacgagaggagctcttccagctgtttggctacggagacgtggtgtttgtcagcaaagatgtggccaagcacttggggttccagtcagcagaggaagccttgaggggcttgtatggtcgtgtgaggaaaggggctgtgcttgtctgtgcctgggctgaggagggcgccgacgccctgggccctgatggcaaattgctccactcggatgctttcccgccaccccgcgtggtggatacactgggagctggagacaccttcaatgcctccgtcatcttcagcctctcccaggggaggagcgtgcaggaagcactgagattcgggtgccaggtggccggcaagaagtgtggcctgcagggctttgatggcatcgtgtga

SEQ ID NO: 362 - protein, 298 aa, Homo sapiens
  P50053
MEEKQILCVGLVVLDVISLVDKYPKEDSEIRCLSQRWQRGGNASNSCTVLSLLGAPCAFMGSMAPGHVADFVLDDLRRYSVDLRYTVFQTTGSVPIATVIINEASGSRTILYYDRSLPDVSATDFEKVDLTQFKWIHIEGRNASEQVKMLQRIDAHNTRQPPEQKIRVSVEVEKPREELFQLFGYGDVVFVSKDVAKHLGFQSAEEALRGLYGRVRKGAVLVCAWAEEGADALGPDGKLLHSDAFPPPRVVDTLGAGDTFNASVIFSLSQGRSVQEALRFGCQVAGKKCGLQGFDGIV

SEQ ID NO: 363 - DNA, 1176 bp, Homo sapiens; identical to SEQ ID NO: 355
  AK021919

SEQ ID NO: 364 - protein, 391 aa, Homo sapiens; identical to SEQ ID NO: 356
  Q9HAB2

SEQ ID NO: 365 - DNA, 1125 bp, Homo sapiens; identical to SEQ ID NO: 357
  AJ000644

SEQ ID NO: 366 - protein, 374 aa, Homo sapiens; identical to SEQ ID NO: 358
  O43791

SEQ ID NO: 367 - DNA, 1197 bp, Homo sapiens
  D16845
atggaaaacgagacagtcagtgaactgaaccaaacacagcttcagccacgagcagtggtggccttagaataccaggtggtcaccatcttacttgtactcattatttgtggcctgggcattgtaggcaacatcatggtagtcctggttgtcatgagaaccaagcacatgaggacccccacaaactgctacctggtgagcctggcagtagctgatctcatggtcttggtggccgcaggcctccccaacataacagacagtatctacggttcctgggtctatggctatgttggatgcctctgcattacttacctccagtatttgggaattaatgcatcctcttgttcaataacagcctttaccattgagaggtacatagcaatctgtcaccccatcaaagcccagtttctctgcacattttccagagccaaaaagattatcatctttgtctgggctttcacatctctttactgtatgctctggttcttcttgctggatctcaatattagcacctacaaagatgctattgtgatatcctgtggctacaagatctccaggaattactactcacctatttacctaatggactttggtgtcttttatgttgtgccaatgatcctggctaccgtcctctatggattcatagctagaatccttttcttaaatcccattccttcagatcctaaagaaaactctaagacatggaaaaatgattcaacccatcagaacacaaatctgaatgtaaatacctctaatagatgtttcaacagcacagtatcttcaaggaagcaggtcaccaagatgctggcagtggttgtaattctgtttgcccttttatggatgccctacaggactctagtggttgtcaactcatttctctccagtcctttccaagaaaattggtttttgctcttttgcagaatttgcatttatctcaacagtgccatcaacccggtgatttacaatctcatgtcccagaaattccgtgcagccttcagaaagctctgcaactgcaagcagaagccaacagagaaacctgctaactacagtgtggccctaaattacagcgtcatcaaggagtcagaccatttcagcacagagcttgatgatatcactgtcactgacacttacctgtctgccacaaaagtgtcttttgatgacacctgcttggcttctgaggtatcctttagccaaagttga

SEQ ID NO: 368 - protein, 398 aa, Homo sapiens
  P34981
MENETVSELNQTQLQPRAVVALEYQVVTILLVLIICGLGIVGNIMVVLVVMRTKHMRTPTNCYLVSLAVADLMVLVAAGLPNITDSIYGSWVYGYVGCLCITYLQYLGINASSCSITAFTIERYIAICHPIKAQFLCTFSRAKKIIIFVWAFTSLYCMLWFFLLDLNISTYKDAIVISCGYKISRNYYSPIYLMDFGVFYVVPMILATVLYGFIARILFLNPIPSDPKENSKTWKNDSTHQNTNLNVNTSNRCFNSTVSSRKQVTKMLAVVVILFALLWMPYRTLVVVNSFLSSPFQENWFLLFCRICIYLNSAINPVIYNLMSQKFRAAFRKLCNCKQKPTEKPANYSVALNYSVIKESDHFSTELDDITVTDTYLSATKVSFDDTCLASEVSFSQS

SEQ ID NO: 369 - DNA, 945 bp, Homo sapiens
  X66114
atggcggcgacggcgagtgccggggccggcgggatggacgggaagccccgtacctcccctaagtccgtcaagttcctgtttgggggcctggccgggatgggagctacagtttttgtccagcccctggacctggtgaagaaccggatgcagttgagcggggaaggggccaagactcgagagtacaaaaccagcttccatgccctcaccagtatcctgaaggcagaaggcctgaggggcatttacactgggctgtcggctggcctgctgcgtcaggccacctacaccactacccgccttggcatctataccgtgctgtttgagcgcctgactggggctgatggtactccccctggctttctgctgaaggctgtgattggcatgaccgcaggtgccactggtgcctttgtgggaacaccagccgaagtggctcttatccgcatgactgccgatggccggcttccagctgaccagcgccgtggctacaaaaatgtgtttaacgccctgattcgaatcacccgggaagagggtgtcctcacactgtggcggggctgcatccctaccatggctcgggccgtcgtcgtcaatgctgcccagctcgcctcctactcccaatccaagcagttcttactggactcaggctacttctctgacaacatcctgtgccacttctgtgccagcatgatcagcggtcttgtcaccactgctgcctccatgcctgtggacattgccaagacccgaatccagaacatgcggatgattgatgggaagccggaatacaagaacgggctggacgtgctgttcaaagttgtccgctacgagggcttcttcagcctgtggaagggcttcacgccgtactatgcccgcctgggcccccacaccgtcctcaccttcatcttcttggagcagatgaacaaggcctacaagcgtctcttcctcagtggctga

SEQ ID NO: 370 - protein, 314 aa, Homo sapiens
  Q02978
MAATASAGAGGIDGKPRTSPKSVKFLFGGLAGMGATVFVQPLDLVKNRMQLSGEGAKTREYKTSFHALTSILKAEGLRGIYTGLSAGLLRQATYTTTRLGIYTVLFERLTGADGTPPGFLLKAVIGMTAGATGAFVGTPAEVALIRMTADGRLPADQRRGYKNVFNALIRITREEGVLTLWRGCIPTMARAVVVNAAQLASYSQSKQFLLDSGYFSDNILCHFCASMISGLVTTAASMPVDIAKTRIQNMRMIDGKPEYKNGLDVLFKVVRYEGFFSLWKGFTPYYARLGPHTVLTFIFLEQMNKAYKRLFLSG

SEQ ID NO: 371 - DNA, 1191 bp, Homo sapiens
  M84424
atgaaaacgctccttcttttgctgctggtgctcctggagctgggagaggcccaaggatcccttcacagggtgcccctcaggaggcatccgtccctcaagaagaagctgcgggcacggagccagctctctgagttctggaaatcccataatttggacatgatccagttcaccgagtcctgctcaatggaccagagtgccaaggaacccctcatcaactacttggatatggaatacttcggcactatctccattggctccccaccacagaacttcactgtcatcttcgacactggctcctccaacctctgggtcccctctgtgtactgcactagcccagcctgcaagacgcacagcaggttccagccttcccagtccagcacatacagccagccaggtcaatctttctccattcagtatggaaccgggagcttgtccgggatcattggagccgaccaagtctctgtggaaggactaaccgtggttggccagcagtttggagaaagtgtcacagagccaggccagacctttgtggatgcagagtttgatggaattctgggcctgggatacccctccttggctgtgggaggagtgactccagtatttgacaacatgatggctcagaacctggtggacttgccgatgttttctgtctacatgagcagtaacccagaaggtggtgcggggagcgagctgatttttggaggctacgaccactcccatttctctgggagcctgaattgggtcccagtcaccaagcaagcttactggcagattgcactggataacatccaggtgggaggcactgttatgttctgctccgagggctgccaggccattgtggacacagggacttccctcatcactggcccttccgacaagattaagcagctgcaaaacgccattggggcagcccccgtggatggagaatatgctgtggagtgtgccaaccttaacgtcatgccggatgtcaccttcaccattaacggagtcccctataccctcagcccaactgcctacaccctactggacttcgtggatggaatgcagttctgcagcagtggctttcaaggacttgacatccaccctccagctgggcccctctggatcctgggggatgtcttcattcgacagttttactcagtctttgaccgtgggaataaccgtgtgggactggccccagcagtcccctaa

SEQ ID NO: 372 - protein, 396 aa, Homo sapiens
  P14091
MKTLLLLLLVLLELGEAQGSLHRVPLRRHPSLKKKLRARSQLSEFWKSHNLDMIQFTESCSMDQSAKEPLINYLDMEYFGTISIGSPPQNFTVIFDTGSSNLWVPSVYCTSPACKTHSRFQPSQSSTYSQPGQSFSIQYGTGSLSGIIGADQVSVEGLTVVGQQFGESVTEPGQTFVDAEFDGILGLGYPSLAVGGVTPVFDNMMAQNLVDLPMFSVYMSSNPEGGAGSELIFGGYDHSHFSGSLNWVPVTKQAYWQIALDNIQVGGTVMFCSEGCQAIVDTGTSLITGPSDKIKQLQNAIGAAPVDGEYAVECANLNVMPDVTFTINGVPYTLSPTAYTLLDFVDGMQFCSSGFQGLDIHPPAGPLWILGDVFIRQFYSVFDRGNNRVGLAPAVP

SEQ ID NO: 373 - DNA, 7530 bp, Homo sapiens
  U29344
atggaggaggtggtgattgccggcatgtccgggaagctgccagagtcggagaacttgcaggagttctgggacaacctcatcggcggtgtggacatggtcacggacgatgaccgtcgctggaaggcggggctctacggcctgccccggcggtccggcaagctgaaggacctgtctaggtttgatgcctccttcttcggagtccaccccaagcaggcacacacgatggaccctcagctgcggctgctgctggaagtcacctatgaagccatcgtggacggaggcatcaacccagattcactccgaggaacacacactggcgtctgggtgggcgtgagcggctctgagacctcggaggccctgagccgagaccccgagacactcgtgggctacagcatggtgggctgccagcgagcgatgatggccaaccggctctccttcttcttcgacttcagagggcccagcatcgcactggacacagcctgctcctccagcctgatggccctgcagaacgcctaccaggccatccacagcgggcagtgccctgccgccatcgtggggggcatcaatgtcctgctgaagcccaacacctccgtgcagttcttgaggctggggatgctcagccccgagggcacctgcaaggccttcgacacagcggggaatgggtactgccgctcggagggtgtggtggccgtcctgctgaccaagaagtccctggcccggcgggtgtacgccaccatcctgaacgccggcaccaatacagatggcttcaaggagcaaggcgtgaccttcccctcaggggatatccaggagcagctcatccgctcgttgtaccagtcggccggagtggcccctgagtcatttgaatacatcgaagcccacggcacaggcaccaaggtgggcgacccccaggagctgaatggcatcacccgagccctgtgcgccacccgccaggagccgctgctcatcggctccaccaagtccaacatggggcacccggagccagcctcggggctggcagccctggccaaggtgctgctgtccctggagcacgggctctgggcccccaacctgcacttccatagccccaaccctgagatcccagcgctgttggatgggcggctgcaggtggtggaccagcccctgcccgtccgtggcggcaacgtgggcatcaactcctttggcttcgggggctccaacgtgcacatcatcctgaggcccaacacgcagccgccccccgcacccgccccacatgccaccctgccccgtctgctgcgggccagcggacgcacccctgaggccgtgcagaagctgctggagcagggcctccggcacagccaggacctggctttcctgagcatgctgaacgacatcgcgctgtccccgaccaccgccatgcccttccgtggctacgctgtgctgggtggtgagcgcggtggcccagaggtgcagcaggtgcccgctggcgagcgcccgctctggttcatctgctctgggatgggcacacagtggcgcgggatggggctgagcctcatgcgcctggaccgcttccgagattccatcctacgctccgatgaggctgtgaaccgattcggcctgaaggtgtcacagctgctgctgagcacagacgagagcacctttgatgacatcgtccattcgtttgtgagcctgactgccatccagataggcctcatagacctgctgagctgcatggggctgaggccagatggcatcgtcggccactccctgggggaggtggcctgtggctacgccgacggctgcctgtcccaggaggaggccgtcctcgctgcctactggaggggacagtgcatcaaagaagcccatctcccgccgggcgccatggcagccgtgggcttgtcctgggaggagtgtaaacagcgctgccccccggcggtggtgcccgcctgccacaactccaaggacacagtcaccatctcgggacctcaggccccggtgtttgagttcgtggagcagctgaggaaggagggtgtgtttgccaaggaggtgcggaccggcggtatggccttccactcctacttcatggaggccatcgcacccccactgctgcaggagctcaagaaggtgatccgggagccgaagccacgttcagcccgctggctcagcacctctatccccgaggcccagtggcacagcagcctggcacgcacgtcctccgccgagtacaatgtcaacaacctggtgagccctgtgctgttccaggaggccctgtggcacgtgcctgagcacgcggtggtgctggagatcgcgccccacgccctgctgcaggctgtcctgaagcgtggcctgaagccgagctgcaccatcatccccctgatgaagaaggatcacagggacaacctggagttcttcctggccggcatccggaggctgcacctctcaggcatcgacgccaaccccaatgccttgttcccacctgtggagttcccagctccccgaggaactcccctcatctccccactcatcaagtgggaccacagcctggcctgggacgtgccggccgccgaggacttccccaacggttcaggttccccctcagccgccatctacaacatcgacaccagctccgagtctcctgaccactacctggtggaccacaccctcgacggtcgcgtcctcttccccgccactggctacctgagcatagtgtggaagacgctggcccgacccctgggcctgggcgtcgagcagctgcctgtggtgtttgaggatgtggtgctgcaccaggccaccatcctgcccaagactgggacagtgtccctggaggtacggctcctggaggcctcccgtgccttcgaggtgtcagagaacggcaacctggtagtgagtgggaaggtgtaccagtgggatgaccctgaccccaggctcttcgaccacccggaaagccccacccccaaccccacggagcccctcttcctggcccaggctgaagtttacaaggagctgcgtctgcgtggctacgactacggccctcatttccagggcatcctggaggccagcctggaaggtgactcggggaggctgctgtggaaggataactgggtgagcttcatggacaccatgctgcagatgtccatcctgggctcggccaagcacggcctgtacctgcccacccgtgtcaccgccatccacatcgaccctgccacccacaggcagaagctgtacacactgcaggacaaggcccaagtggctgacgtggtggtgagcaggtggctgagggtcacagtggccggaggcgtccacatctccgggctccacactgagtcggccccgcggcggcagcaggagcagcaggtgcccatcctggagaagttttgcttcacttcccacacggaggaggggtgcctgtctgagcgcgctgccctgcaggaggagctgcaactgtgcaaggggctggtgcaggcactgcagaccaaggtgacccagcaggggctgaagatggtggtgcccggactggatggggcccagatcccccgggacccctcacagcaggaactgccccggctgttgtcggctgcctgcaggcttcagctcaacgggaacctgcagctggagctggcgcaggtgctggcccaggagaggcccaagctgccagaggaccctctgctcagcggcctcctggactccccggcactcaaggcctgcctggacactgccgtggagaacatgcccagcctgaagatgaaggtggtggaggtgctggccggccacggtcacctgtattcccgcatcccaggcctgctcagcccccatcccctgctgcagctgagctacacggccaccgaccgccacccccaggccctggaggctgcccaggccgagctgcagcagcacgacgttgcccagggccagtgggatcccgcagaccctgcccccagcgccctgggcagcgccgacctcctggtgtgcaactgtgctgtggctgccctcggggacccggcctcagctctcagcaacatggtggctgccctgagagaagggggctttctgctcctgcacacactgctccgggggcacccctcgggacatgtggccttcctcacctccactgagccgcagtatggccagggcatcctgagccaggacgcgtgggagagcctcttctccagggtgtccgtgcgcctggtgggcctgaagaagtccttctacggctccacgctcttcctgtgccgccggcccaccccgcaggacagccccatcttcctgccggtggacgataccagcttccgctgggtggagtctctgaagggcatcctggctgacgaagactcttcccggcctgtgtggctgaaggccatcaactgtgccacctcgggcgtggtgggcttggtgaactgtctccgccgagagcccggcggaacgctccggtgtgtgctgctctccaacctcagcagcacctcccacgtcccggaggtggacccgggctccgcagaactgcagaaggtgttgcagggagacctggtgatgaacgtctaccgcgacggggcctggggggctttccgccacttcctgctggaggaggacaagcctgaggagccgacggcacatgcctttgtgagcaccctcacccggggggacctgtcctccatccgctgggtctgctcctcgctgcgccatgcccagcccacctgccctggcgcccagctctgcacggtctactacgcctccctcaacttccgcgacatcatgctggccactggcaagctgtcccctgatgccatcccagggaagtggacctcccaggacagcctgctaggtatggagttctcgggccgagacgccagcggcaagcgtgtgatgggactggtgcctgccaagggcctggccacctctgtcctgctgtcaccggacttcctctgggatgtgccttccaactggacgctggaggaggcggcctcggtgcctgtcgtctacagcacggcctactacgcgctggtggtgcgtgggcgggtgcgccccggggagacgctgctcatccactcgggctcgggcggcgtgggccaggccgccatcgccatcgccctcagtctgggctgccgcgtcttcaccaccgtggggtcggctgagaagcgggcgtacctccaggccaggttcccccagctcgacagcaccagcttcgccaactcccgggacacatccttcgagcagcatgtgctgtggcacacgggcgggaagggcgttgacctggtcttgaactccttggcggaagagaagctgcaggccagcgtgaggtgcttggctacgcacggtcgcttcctggaaattggcaaattcgacctttctcagaaccacccgctcggcatggctatcttcctgaagaacgtgacattccacggggtcctactggatgcgttcttcaacgagagcagtgctgactggcgggaggtgtgggcgcttgtgcaggccggcatccgggatggggtggtacggcccctcaagtgcacggtgttccatggggcccaggtggaggacgccttccgctacatggcccaagggaagcacattggcaaagtcgtcgtgcaggtgcttgcggaggagccggaggcagtgctgaagggggccaaacccaagctgatgtcggccatctccaagaccttctgcccggcccacaagagctacatcatcgctggtggtctgggtggcttcggcctggagttggcgcagtggctgatacagcgtggggtgcagaagctcgtgttgacttctcgctccgggatccggacaggctaccaggccaagcaggtccgccggtggagggcccagggcgtacaggtgcaggtgtccaccagcaacatcagctcactggagggggcccggggcctcattgccgaggcggcgcagcttgggcccgtgggcggcgtcttcaacctggccgtggtcttgagagatggcttgctggagaaccagaccccagagttcttccaggacgtctgcaagcccaagtacagcggcaccctgaacctggacagggtgacccgagaggcgtgccctgagctggactactttgtggtcttctcctctgtgagctgcgggcgtggcaatgcgggacagagcaactacggctttgccaattccgccatggagcgtatctgtgagaaacgccggcacgaaggcctcccaggcctggccgtgcagtggggcgccatcggcgacgtgggcattttggtggagacgatgagcaccaacgacacgatcgtcagtggcacgctgccccaggccatggcgtcctgcctggaggtgctggacctcttcctgaaccagccccacatggtcctgagcagctttgtgctggctgagaaggctgcggcctatagggacagggacagccagcgggacctggtggaggccgtggcacacatcctgggcatccgcgacttggctgctgtcaacctggacagctcactggcggacctgggcctggactcgctcatgagcgtggaggtgcgccagacgctggagcgtgagctcaacctggtgctgtccgtgcgcgaggtgcggcaactcacgctccggaaactgcaggagctgtcctcaaaggcggatgaggccagcgagctggcatgccccacgcccaaggaggatggtctggcccagcagcagactcagctgaacctgcgctccctgctggtgaacccggagggccccaccctgatgcggctcaactccgtgcagagctcggagcggcccctgttcctggtgcacccaatcgagggctccaccaccgtgttccacagcctggcctcccggctcagcatccccacctatggcctgcagtgcacccgagctgcgccccttgacagcatccacagcctggctgcctactacatcgactgcatcaggcaggtgcagcccgagggcccctaccgcgtggccggctactcctacggggcctgcgtggcctttgaaatgtgctcccagctgcaggcccagcagagcccagcccccacccacaacagcctcttcctgttcgacggctcgcccacctacgtactggcctacacccagagctaccgggcaaagctgaccccaggctgtgaggctgaggctgagacggaggccatatgcttcttcgtgcagcagttcacggacatggagcacaacagggtgctggaggcgctgctgccgctgaagggcctagaggagcgtgtggcagccgccgtggacctgatcatcaagagccaccagggcctggaccgccaggagctgagctttgcggcccggtccttctactacaagctcggtgccgctgagcagtacacacccaaggccaagtaccatggcaacgtgatgctactgcgcgccaagacgggtggcgcctacggcgaggacctgggcgcggattacaacctctcccaggtatgcgacgggaaagtatccgtccacgtcatcgagggtgaccaccgcacgctgctggagggcagcggcctggagtccatcatcagcatcatccacagctccctggctgagccacgcgtgagcgtgcgggagggctag

SEQ ID NO: 374 - protein, 2509 aa, Homo sapiens [sequence omitted]

SEQ ID NO: 375 - DNA, 1167 bp, Homo sapiens
  AB083594
atggaggcaccacctctcatggttgtgttagaatataagcataactttaaaatagtatccactaattgtatgaggtgctatttggtaatgctgaggttgtccctcaaaagcattgattcaatcattttcacttccatgggagtgcaaaataaacatatgcctagggcccccataggagccaacgaagtcatctttgcttcagagctaaacccagtttttcttctctccacagcaaatatcttgacagtgatcatcctctcccagctggtggcaagaagacagaagtcctcctacaactatctcttggcactcgctgctgccgacatcttggtcctctttttcatagtgtttgtggacttcctgttggaagatttcatcttgaacatgcagatgcctcaggtccccgacaagatcatagaagtgctggaattctcatccatccacacctccatatggattactgtaccgttaaccattgacaggtatatcgctgtctgccacccgctcaagtaccacacggtctcatacccagcccgcacccggaaagtcattgtaagtgtttacatcacctgcttcctgaccagcatcccctattactggtggcccaacatctggactgaagactacatcagcacctctgtgcatcacgtcctcatctggatccactgcttcaccgtctacctggtgccctgctccatcttcttcatcttgaactcaatcattgtgtacaagctcaggaggaagagcaattttcgtctccgtggctactccacggggaagaccaccgccatcttgttcaccattacctccatctttgccacactttgggccccccgcatcatcatgattctttaccacctctatggggcgcccatccagaaccgctggctggtacacatcatgtccgacattgccaacatgctagcccttctgaacacagccatcaacttcttcctctactgcttcatcagcaagcggttccgcaccatggcagccgccacgctcaaggctttcttcaagtgccagaagcaacctgtacagttctacaccaatcataacttttccataacaagtagcccctggatctcgccggcaaactcacactgcatcaagatgctggtgtaccagtatgacaaaaatggaaaacctataaaagtatccccgtga

SEQ ID NO: 376 - protein, 388 aa, Homo sapiens
  Q8TDU8
MEAPPLMVVLEYKHNFKIVSTNCMRCYLVMLRLSLKSIDSIIFTSMGVQNKHMPRAPIGANEVIFASELNPVFLLSTANILTVIILSQLVARRQKSSYNYLLALAAADILVLFFIVFVDFLLEDFILNMQMPQVPDKIIEVLEFSSIHTSIWITVPLTIDRYIAVCHPLKYHTVSYPARTRKVIVSVYITCFLTSIPYYWWPNIWTEDYISTSVHHVLIWIHCFTVYLVPCSIFFILNSIIVYKLRRKSNFRLRGYSTGKTTAILFTITSIFATLWAPRIIMILYHLYGAPIQNRWLVHIMSDIANMLALLNTAINFFLYCFISKRFRTMAAATLKAFFKCQKQPVQFYTNHNFSITSSPWISPANSHCIKMLVYQYDKNGKPIKVSP

SEQ ID NO: 377 - DNA, 1302 bp, Homo sapiens
  D11094
atgccggattacctcggtgccgatcagcggaagaccaaagaggatgagaaggacgacaagcccatccgagctctggatgagggggatattgccttgttgaaaacttatggtcagagcacttactctaggcagatcaagcaagttgaagatgacattcagcaacttctcaagaaaattaatgagctcactggtattaaagaatctgacactggcctggccccaccagcactctgggatttggctgcagataagcagacactccagagtgaacagcctttacaggttgccaggtgtacaaagataatcaatgctgattcggaggacccaaaatacattatcaacgtaaagcagtttgccaagtttgtggtggaccttagtgatcaggtggcacctactgacattgaagaagggatgagagtgggcgtggatagaaataaatatcaaattcacattccattgcctcctaagattgacccaacagttaccatgatgcaggtggaagagaaacctgatgtcacatacagtgatgttggtggctgtaaggaacagattgagaaactgcgagaagtagttgaaaccccattacttcatccagagaggtttgtgaaccttggcattgagcctcccaagggcgtgctgctctttggtccacccggtacaggcaagacactctgtgcgcgggcagttgctaatcggactgatgcgtgcttcattcgagttattggatctgagcttgtacagaaatacgtcggtgagggggctcgaatggttcgtgaactctttgaaatggccagaacaaaaaaagcctgccttatcttctttgatgaaattgatgctattggaggggctcgttttgatgatggtgctggaggtgacaatgaagtgcagagaacaatgttggaactgatcaatcagcttgatggttttgatcctcgaggcaatattaaagtgctgatggccactaacagacctgatactttggatccagcactgatgaggccagggagattggatagaaaaattgaatttagcttgcccgatctagagggtcggacccacatatttaagattcacgctcgttcaatgagtgttgaaagagatatcagatttgaactgttagcacgactgtgtccaaatagcactggtgctgagattagaagcgtctgcacagaggctggtatgtttgccatcagagcacggcgaaaaattgctaccgagaaggatttcttggaagctgtaaataaggtcattaagtcttatgccaaattcagtgctactcctcgttacatgacatacaactga

SEQ ID NO: 378 - protein, 433 aa, Homo sapiens
  P35998
MPDYLGADQRKTKEDEKDDKPIRALDEGDIALLKTYGQSTYSRQIKQVEDDIQQLLKKINELTGIKESDTGLAPPALWDLAADKQTLQSEQPLQVARCTKIINADSEDPKYIINVKQFAKFVVDLSDQVAPTDIEEGMRVGVDRNKYQIHIPLPPKIDPTVTMMQVEEKPDVTYSDVGGCKEQIEKLREVVETPLLHPERFVNLGIEPPKGVLLFGPPGTGKTLCARAVANRTDACFIRVIGSELVQKYVGEGARMVRELFEMARTKKACLIFFDEIDAIGGARFDDGAGGDNEVQRTMLELINQLDGFDPRGNIKVLMATNRPDTLDPALMRPGRLDRKIEFSLPDLEGRTHIFKIHARSMSVERDIRFELLARLCPNSTGAEIRSVCTEAGMFAIRARRKIATEKDFLEAVNKVIKSYAKFSATPRYMTYN

SEQ ID NO: 379 - DNA, 3393 bp, Homo sapiens
  AF104413
atgaagaggagtgaaaagccagaaggatatagacaaatgaggcctaagacctttcctgccagtaactatactgtcagtagccggcaaatgttacaagaaattcgggaatcccttaggaatttatctaaaccatctgatgctgctaaggctgagcataacatgagtaaaatgtcaaccgaagatcctcgacaagtcagaaatccacccaaatttgggacgcatcataaagccttgcaggaaattcgaaactctctgcttccatttgcaaatgaaacaaattcttctcggagtacttcagaagttaatccacaaatgcttcaagacttgcaagctgctggatttgatgaggatatggttatacaagctcttcagaaaactaacaacagaagtatagaagcagcaattgaattcattagtaaaatgagttaccaagatcctcgacgagagcagatggctgcagcagctgccagacctattaatgccagcatgaaaccagggaatgtgcagcaatcagttaaccgcaaacagagctggaaaggttctaaagaatccttagttcctcagaggcatggcccgccactaggagaaagtgtggcctatcattctgagagtcccaactcacagacagatgtaggaagacctttgtctggatctggtatatcagcatttgttcaagctcaccctagcaacggacagagagtgaaccccccaccaccacctcaagtaaggagtgttactcctccaccacctccaagaggccagactccccctccaagaggtacaactccacctcccccttcatgggaaccaaactctcaaacaaagcgctattctggaaacatggaatacgtaatctcccgaatctctcctgtcccacctggggcatggcaagagggctatcctccaccacctctcaacacttcccccatgaatcctcctaatcaaggacagagaggcattagttctgttcctgttggcagacaaccaatcatcatgcagagttctagcaaatttaactttccatcagggagacctggaatgcagaatggtactggacaaactgatttcatgatacaccaaaatgttgtccctgctggcactgtgaatcggcagccaccacctccatatcctctgacagcagctaatggacaaagcccttctgctttacaaacagggggatctgctgctccttcgtcatatacaaatggaagtattcctcagtctatgatggtgccaaacagaaatagtcataacatggaactatataacattagtgtacctggactgcaaacaaattggcctcagtcatcttctgctccagcccagtcatccccgagcagtgggcatgaaatccctacatggcaacctaacataccagtgaggtcaaattcttttaataacccattaggaaatagagcaagtcactctgctaattctcagccttctgctacaacagtcactgcaattacaccagctcctattcaacagcctgtgaaaagtatgcgtgtattaaaaccagagctacagactgctttagcacctacacacccttcttggataccacagccaattcaaactgttcaacccagtccttttcctgagggaaccgcttcaaatgtgactgtgatgccacctgttgctgaagctccaaactatcaaggaccaccaccaccctacccaaaacatctgctgcaccaaaacccatctgttcctccatacgagtcaatcagtaagcctagcaaagaggatcagccaagcttgcccaaggaagatgagagtgaaaagagttatgaaaatgttgatagtggggataaagaaaagaaacagattacaacttcacctattactgttaggaaaaacaagaaagatgaagagcgaagggaatctcgtattcaaagttattctcctcaagcatttaaattctttatggagcaacatgtagaaaatgtactcaaatctcatcagcagcgtctacatcgtaaaaaacaattagagaatgaaatgatgcgggttggattatctcaagatgcccaggatcaaatgagaaagatgctttgccaaaaagaatctaattacatccgtcttaaaagggctaaaatggacaagtctatgtttgtgaagataaagacactaggaataggagcatttggtgaagtctgtctagcaagaaaagtagatactaaggctttgtatgcaacaaaaactcttcgaaagaaagatgttcttcttcgaaatcaagtcgctcatgttaaggctgagagagatatcctggctgaagctgacaatgaatgggtagttcgtctatattattcattccaagataaggacaatttatactttgtaatggactacattcctgggggtgatatgatgagcctattaattagaatgggcatctttccagaaagtctggcacgattctacatagcagaacttacctgtgcagttgaaagtgttcataaaatgggttttattcatagagatattaaacctgataatattttgattgatcgtgatggtcatattaaattgactgactttggcctctgcactggcttcagatggacacacgattctaagtactatcagagtggtgaccatccacggcaagatagcatggatttcagtaatgaatggggggatccctcaagctgtcgatgtggagacagactgaagccattagagcggagagctgcacgccagcaccagcgatgtctagcacattctttggttgggactcccaattatattgcacctgaagtgttgctacgaacaggatacacacagttgtgtgattggtggagtgttggtgttattctttttgaaatgttggtgggacaacctcctttcttggcacaaacaccattagaaacacaaatgaaggttatcaactggcaaacatctcttcacattccaccacaagctaaactcagtcctgaagcttctgatcttattattaaactttgccgaggacccgaagatcgcttaggcaagaatggtgctgatgaaataaaagctcatccattttttaaaacaattgacttctccagtgacctgagacagcagtctgcttcatacattcctaaaatcacacacccaacagatacatcaaattttgatcctgttgatcctgataaattatggagtgatgataacgaggaagaaaatgtaaatgacactctcaatggatggtataaaaatggaaagcatcctgaacatgcattctatgaatttaccttccgaaggttttttgatgacaatggctacccatataattatccgaagcctattgaatatgaatacattaattcacaaggctcagagcagcagtcggatgaagatgatcaaaacacaggctcagagattaaaaatcgcgatctagtatatgtttaa

SEQ ID NO: 380 - protein, 1130 aa, Homo sapiens
  O95835
MKRSEKPEGYRQMRPKTFPASNYTVSSRQMLQEIRESLRNLSKPSDAAKAEHNMSKMSTEDPRQVRNPPKFGTHHKALQEIRNSLLPFANETNSSRSTSEVNPQMLQDLQAAGFDEDMVIQALQKTNNRSIEAAIEFISKMSYQDPRREQMAAAAARPINASMKPGNVQQSVNRKQSWKGSKESLVPQRHGPPLGESVAYHSESPNSQTDVGRPLSGSGISAFVQAHPSNGQRVNPPPPPQVRSVTPPPPPRGQTPPPRGTTPPPPSWEPNSQTKRYSGNMEYVISRISPVPPGAWQEGYPPPPLNTSPMNPPNQGQRGISSVPVGRQPIIMQSSSKFNFPSGRPGMQNGTGQTDFMIHQNVVPAGTVNRQPPPPYPLTAANGQSPSALQTGGSAAPSSYTNGSIPQSMMVPNRNSHNMELYNISVPGLQTNWPQSSSAPAQSSPSSGHEIPTWQPNIPVRSNSFNNPLGNRASHSANSQPSATTVTAITPAPIQQPVKSMRVLKPELQTALAPTHPSWIPQPIQTVQPSPFPEGTASNVTVMPPVAEAPNYQGPPPPYPKHLLHQNPSVPPYESISKPSKEDQPSLPKEDESEKSYENVDSGDKEKKQITTSPITVRKNKKDEERRESRIQSYSPQAFKFFMEQHVENVLKSHQQRLHRKKQLENEMMRVGLSQDAQDQMRKMLCQKESNYIRLKRAKMDKSMFVKIKTLGIGAFGEVCLARKVDTKALYATKTLRKKDVLLRNQVAHVKAERDILAEADNEWVVRLYYSFQDKDNLYFVMDYIPGGDMMSLLIRMGIFPESLARFYIAELTCAVESVHKMGFIHRDIKPDNILIDRDGHIKLTDFGLCTGFRWTHDSKYYQSGDHPRQDSMDFSNEWGDPSSCRCGDRLKPLERRAARQHQRCLAHSLVGTPNYIAPEVLLRTGYTQLCDWWSVGVILFEMLVGQPPFLAQTPLETQMKVINWQTSLHIPPQAKLSPEASDLIIKLCRGPEDRLGKNGADEIKAHPFFKTIDFSSDLRQQSASYIPKITHPTDTSNFDPVDPDKLWSDDNEEENVNDTLNGWYKNGKHPEHAFYEFTFRRFFDDNGYPYNYPKPIEYEYINSQGSEQQSDEDDQNTGSEIKNRDLVYV

SEQ ID NO: 381 - DNA, 3143 bp, Homo sapiens
  AB028019
caaacagtgacacttccctggatgccaaagtcctggggagcaaagatgccaccagcagcaagcagcagatgagagccaccccaaagttcggaccttatcagaaagccttgagggaaatcagatattccttgttgccttttgctaatgaatcgggcacctctgcagctgcagaagtgaaccggcaaatgctgcaggaactggtgaacgcaggatgcgaccaggagatggctggccgagctctcaagcagactggcagcaggagcatcgaggccgccctggagtacatcagcaagatgggctacctggacccgaggaatgagcagattgtgcgggtcattaagcagacctccccaggaaaggggctcatgccaaccccagtgacgcggaggcccagcttcgaaggaaccggcgattcgtttgcgtcctaccaccagctgagcggtaccccctacgagggcccaagcttcggcgctgacggccccacggcgctggaggagatgccgcggccgtacgtggactaccttttccccggagtcggcccccacgggcccggccaccagcaccagcacccacccaagggctacggtgccagcgtagaggcagcaggggcacacttcccgctgcagggcgcgcactacgggcggccgcacctgctggtgcctggggaacccctgggctacggagtgcagcgcagcccctccttccagagcaagacgccgccggagaccgggggttacgccagcctgcccacgaagggccagggaggaccgccaggcgccggcctcgctttcccaccccctgccgccgggctctacgtgccgcacccacaccacaagcaggccggtcccgtggcccaccagctgcatgtgctgggctcccgcagccaggtgttcgccagcgacagccccccgcagagcctgctcactccctcgcggaacagcctcaacgtggacctgtatgaattgagcagcacctccgtccagcagtggccggctgccaccctggcccgccgggactccctgcagaagccgggcctggaggcgccgccgcgcgcgcacgtggccttccggcctgactgcccagtgcccagcaggaccaactccttcaacagccaccagccgcggcccggtccgcctggcaaggccgagccctccctgcccgcccccaacaccgtgacggctgtcagcgccgcgcacatcttgcacccggtgaagagcgtgcgtgtgctgaggccggagccgcagacggctgtggggccctcgcaccccgcctgggtgcccgcgcctgccccggcccccgcccccgcccccgccccggctgcggagggcttggacgccaaggaggagcatgccctggcgctgggcggcgcaggcgccttcccgctggacgtggagtacggaggcccagaccggagtgcccgcctccgccctacccgaagcacctgctgctgcgcaaagtcggagcagtacgacctggacagcctgtgcgcaggcatggagcagagcctccgtgcgggccccaacgagcccgagggcggcgacaagagccgcaaaagcgccaagggggacaaaggcggaaaggataaaaagcagattcagacctctcccgttcccgtccgcaaaaacagcagagacgaagagaagagagagtcacgcatcaagagctactcgccatacgcctttaagttcttcatggagcagcacgtggagaatgtcatcaaaacctaccagcagaaggttaaccggaggctgcagctggagcaagaaatggccaaagctggactctgtgaagctgagcaggagcagatgcggaagatcctctaccagaaagagtctaattacaacaggttaaagagggccaagatggacaagtctatgtttgtcaagatcaaaaccctggggatcggtgcctttggagaagtgtgccttgcttgtaaggtggacactcacgccctgtacgccatgaagaccctaaggaaaaaggatgtcctgaaccggaatcaggtggcccacgtcaaggccgagagggacatcctggccgaggcagacaatgagtgggtggtcaaactctactactccttccaagacaaagacagcctgtactttgtgatggactacatccctggtggggacatgatgagcctgctgatccggatggaggtcttccctgagcacctggcccggttctacatcgcagagctgactttggccattgagagtgtccacaagatgggcttcatccaccgagacatcaagcctgataacattttgatagatctggatggtcacattaaactcacagatttcggcctctgcactgggttcaggtggactcacaattccaaatattaccagaaagggagccatgtcagacaggacagcatggagcccagcgacctctgggatgatgtgtctaactgtcggtgtggggacaggctgaagaccctagagcagagggcgcggaagcagcaccagaggtcgctggcacattcactggtggggactccaaactacatcgcacccgaggtgctcctccgcaaagggtacactcaactctgtgactggtggagtgttggagtgattctcttcgagatgctggtggggcagccgccctttttggcacctactcccacagaaacccagctgaaggtgatcaactgggagaacacgctccacattccagcccaggtgaagctgagccctgaggccagggacctcatcaccaagctgtgctgctccgcagaccaccgcctggggcggaatggggccgatgacctgaaggcccaccccttcttcagcgccattgacttctccagtgacatccggaagcagccagccccctacgttcccaccatcagccaccccatggacacctcgaatttcgaccccgtagatgaagaaagcccttggaacgatgccagcgaaggtagcaccaaggcctgggacacactcacctcgcccaataacaagcatcctgagcacgcattttacgaattcaccttccgaaggttctttgatgacaatggctacccctttcgatgcccaaagccttcaggagcagaagcttcacaggctgagagctcagatttagaaagctctgatctggtggatcagactgaaggctgccagcctgtgtacgtgtag

SEQ ID NO: 382 - protein, 1046 aa, Homo sapiens
  Q9P2X1
NSDTSLDAKVLGSKDATSSKQQMRATPKFGPYQKALREIRYSLLPFANESGTSAAAEVNRQMLQELVNAGCDQEMAGRALKQTGSRSIEAALEYISKMGYLDPRNEQIVRVIKQTSPGKGLMPTPVTRRPSFEGTGDSFASYHQLSGTPYEGPSFGADGPTALEEMPRPYVDYLFPGVGPHGPGHQHQHPPKGYGASVEAAGAHFPLQGAHYGRPHLLVPGEPLGYGVQRSPSFQSKTPPETGGYASLPTKGQGGPPGAGLAFPPPAAGLYVPHPHHKQAGPVAHQLHVLGSRSQVFASDSPPQSLLTPSRNSLNVDLYELSSTSVQQWPAATLARRDSLQKPGLEAPPRAHVAFRPDCPVPSRTNSFNSHQPRPGPPGKAEPSLPAPNTVTAVSAAHILHPVKSVRVLRPEPQTAVGPSHPAWVPAPAPAPAPAPAPAAEGLDAKEEHALALGGAGAFPLDVEYGGPDRSARLRPTRSTCCCAKSEQYDLDSLCAGMEQSLRAGPNEPEGGDKSRKSAKGDKGGKDKKQIQTSPVPVRKNSRDEEKRESRIKSYSPYAFKFFMEQHVENVIKTYQQKVNRRLQLEQEMAKAGLCEAEQEQMRKILYQKESNYNRLKRAKMDKSMFVKIKTLGIGAFGEVCLACKVDTHALYAMKTLRKKDVLNRNQVAHVKAERDILAEADNEWVVKLYYSFQDKDSLYFVMDYIPGGDMMSLLIRMEVFPEHLARFYIAELTLAIESVHKMGFIHRDIKPDNILIDLDGHIKLTDFGLCTGFRWTHNSKYYQKGSHVRQDSMEPSDLWDDVSNCRCGDRLKTLEQRARKQHQRSLAHSLVGTPNYIAPEVLLRKGYTQLCDWWSVGVILFEMLVGQPPFLAPTPTETQLKVINWENTLHIPAQVKLSPEARDLITKLCCSADHRLGRNGADDLKAHPFFSAIDFSSDIRKQPAPYVPTISHPMDTSNFDPVDEESPWNDASEGSTKAWDTLTSPNNKHPEHAFYEFTFRRFFDDNGYPFRCPKPSGAEASQAESSDLESSDLVDQTEGCQPVYV

SEQ ID NO: 383 - DNA, 2583 bp, Homo sapiens
  AF283512
atgaaacaggcttccagacagttccagtccattctgcaagagaggcaatcactccctgcttgggaagaaagagaaaccattcttaacttattgcgtaagcaccaggtggttgtcataagtggtatgactggatgtgggaaaaccacacaaattccgcagtttattctggatgattctctgagtggaccacctgagaaggtagccaacatcatctgtacccaaccccgacgaatctctgcaatctctgttgctgaacgcgttgctaaagaaagagcagagagggtgggtctgaccgtgggataccagattcggttagaaagtgtcaagtcctcagccaccagactgttatactgcaccacgggagtgctgctgagaaggctagaaggagatacagctctacaaggagtttcccatatcattgttgatgaagttcatgagaggacagaagaaagtgacttcttgctgctagttttgaaggacattgtatcgcagaggccaggtcttcaagttattttaatgagtgcaactctaaacgctgagcttttttcagactattttaattcctgccccgtcattactataccaggtcgtacatttcctgttgatcaattttttttggaagatgcaattgctgtgacaaggtatgtattacaggatgggagcccatatatgcggtccatgaaacagatttcaaaggaaaagcttaaagcaaggcggaacagaactgcatttgaagaagtggaagaagacctaaggctctcccttcacctccaggatcaggattctgtcaaagatgcagtgccagatcaacagttagattttaagcagctcctggcccgctataaaggggttagcaagtcagtcatcaaaacaatgtccatcatggattttgaaaaggtgaatcttgaattaatagaggccttattagagtggattgtggatggaaagcactcctaccctccaggtgctatacttgtatttttaccaggactagcagaaatcaaaatgctttatgaacagctacagtctaattctcttttcaacaacagacgtagtaatcgatgtgttattcacccacttcattcatctttatccagtgaagagcagcaggctgtgtttgtaaaacctcctgcaggagtaactaagattataatttccaccaacattgctgagacatccataaccatcgatgatgttgtctatgttatcgattctgggaaaatgaaagaaaagagatatgatgccagcaaagggatggaaagtctagaggacacctttgtatctcaagctaatgctctacaaaggaaaggccgagcaggccgtgttgcatctggggtctgcttccatgtattcactagccatcactacaatcaccagcttttaaaacaacagctaccagaaatacaaagagtgccattggaacagctgtgtctaagaattaaaattttagagatgtttagtgctcataatctccagtctgtgttctctcggctcattgaacctccacacaccgattctcttcgtgcctcaaaaatacgattacgagacttaggagcattaactccagatgaaagattgacccctcttgggtatcatttggcctctctgcccgtggatgtgagaattggcaaactaatgttgtttgggtctatcttccgctgtttggatcctgctctcaccattgctgccagtttggcttttaagtcgccgtttgtatctccctgggataaaaaagaagaagctaaccagaaaaagctggaatttgcattcgcaaacagtgattatctggcccttctacaagcgtataagggatggcagctaagtacaaaagaaggcgtgcgtgcaagttataattactgcagacaaaacttcttgtctggaagagttctgcaggaaatggccagcctcaaacgacaattcacggaactgttgtcggatatagggtttgcaagggaagggctcagagcaagggaaattgagaaaagggcccaaggaggagatggtgtcttagatgccacaggagaagaggcaaactcaaatgctgagaaccccaagctgatatcagcaatgctgtgtgctgctttgtatccaaatgtagtgcaggtgaaaagcccagaaggaaaatttcagaagaccagtactggagctgtcagaatgcaaccaaaatcagctgagttgaagtttgtcaccaagaacgatggatatgtacacattcacccttcatcagtgaactatcaggtgagacactttgacagcccctacctgttgtaccacgagaagataaaaactagtcgagtattcatccgagactgcagcatggtgtctgtgtacccgctggtcttgtttggaggaggccaagtgaatgtgcagcttcaaagaggagagttcgttgtctccctggatgatggttggatccgttttgtagctgcttcccatcaggtggctgaactggtaaaggagcttcgttgtgaacttgatcagcttctccaggataaaattaaaaacccaagcattgatctgtgtacgtgtcctcgaggatcccggatcatcagcacaattgtgaaacttgtcaccacacaataa

SEQ ID NO: 384 - protein, 860 aa, Homo sapiens
  Q8NG17; AAM73547
MKQASRQFQSILQERQSLPAWEERETILNLLRKHQVVVISGMTGCGKTTQIPQFILDDSLSGPPEKVANIICTQPRRISAISVAERVAKERAERVGLTVGYQIRLESVKSSATRLLYCTTGVLLRRLEGDTALQGVSHIIVDEVHERTEESDFLLLVLKDIVSQRPGLQVILMSATLNAELFSDYFNSCPVITIPGRTFPVDQFFLEDAIAVTRYVLQDGSPYMRSMKQISKEKLKARRNRTAFEEVEEDLRLSLHLQDQDSVKDAVPDQQLDFKQLLARYKGVSKSVIKTMSIMDFEKVNLELIEALLEWIVDGKHSYPPGAILVFLPGLAEIKMLYEQLQSNSLFNNRRSNRCVIHPLHSSLSSEEQQAVFVKPPAGVTKIIISTNIAETSITIDDVVYVIDSGKMKEKRYDASKGMESLEDTFVSQANALQRKGRAGRVASGVCFHVFTSHHYNHQLLKQQLPEIQRVPLEQLCLRIKILEMFSAHNLQSVFSRLIEPPHTDSLRASKIRLRDLGALTPDERLTPLGYHLASLPVDVRIGKLMLFGSIFRCLDPALTIAASLAFKSPFVSPWDKKEEANQKKLEFAFANSDYLALLQAYKGWQLSTKEGVRASYNYCRQNFLSGRVLQEMASLKRQFTELLSDIGFAREGLRAREIEKRAQGGDGVLDATGEEANSNAENPKLISAMLCAALYPNVVQVKSPEGKFQKTSTGAVRMQPKSAELKFVTKNDGYVHIHPSSVNYQVRHFDSPYLLYHEKIKTSRVFIRDCSMVSVYPLVLFGGGQVNVQLQRGEFVVSLDDGWIRFVAASHQVAELVKELRCELDQLLQDKIKNPSIDLCTCPRGSRIISTIVKLVTTQ

SEQ ID NO: 385 - DNA, 897 bp, Homo sapiens; identical to SEQ ID NO: 361
  X78678

SEQ ID NO: 386 - protein, 298 aa, Homo sapiens; identical to SEQ ID NO: 362
  P50053

SEQ ID NO: 387 - DNA, 1923 bp, Homo sapiens
  X92720
atggccgcattgtaccgccctggcctgcggcttaactggcatgggctgagccccttgggctggccatcatgccgtagcatccagaccctgcgagtgcttagtggagatctgggccagcttcccactggcattcgagattttgtagagcacagtgcccgcctgtgccaaccagagggcatccacatctgtgatggaactgaggctgagaatactgccacactgaccctgctggagcagcagggcctcatccgaaagctccccaagtacaataactgctggctggcccgcacagaccccaaggatgtggcacgagtagagagcaagacggtgattgtaactccttctcagcgggacacggtaccactcccgcctggtggggcctgtgggcagctgggcaactggatgtccccagctgatttccagcgagctgtggatgagaggtttccaggctgcatgcagggccgcaccatgtatgtgcttccattcagcatgggtcctgtgggctccccgctgtcccgcatcggggtgcagctcactgactcagcctatgtggtggcaagcatgcgtattatgacccgactggggacacctgtgcttcaggccctgggagatggtgactttgtcaagtgtctgcactccgtgggccagcccctgacaggacaaggggagccagtgagccagtggccgtgcaacccagagaaaaccctgattggccacgtgcccgaccagcgggagatcatctccttcggcagcggctatggtggcaactccctgctgggcaagaagtgctttgccctacgcatcgcctctcggctggcccgggatgagggctggctggcagagcacatgctgatcctgggcatcaccagccctgcagggaagaaggcgctatgtgcagccgccttccctagtgcctgtggcaagaccaacctggctatgatgcggcctgcactgccaggctggaaagtggagtgtgtgggggatgatattgcttggatgaggtttgacagtgaaggtcgactccgggccatcaaccctgagaacggcttctttggggttgcccctggtacctctgccaccaccaatcccaacgccatggctacaatccagagtaacactatttttaccaatgtggctgagaccagtgatggtggcgtgtactgggagggcattgaccagcctcttccacctggtgttactgtgacctcctggctgggcaaaccctggaaacctggtgacaaggagccctgtgcacatcccaactctcgattttgtgccccggctcgccagtgccccatcatggacccagcctgggaggccccagagggtgtccccattgacgccatcatctttggtggccgcagacccaaaggggtacccctggtatacgaggccttcaactggcgtcatggggtgtttgtgggcagagccatgcgctctgagtccactgctgcagcagaacacaaagggaagatcatcatgcacgacccatttgccatgcggcccttttttggctacaacttcgggcactacctggaacactggctgagcatggaagggcgcaagggggcccagctgccccgtatcttccatgtcaactggttccggcgtgacgaggcagggcacttcctgtggccaggctttggggagaatgctcgggtgctagactggatctgccggcggttagagggggaggacagtgcccgagagacacccattgggctggtgccaaaggaaggagccttggatctcagcggcctcagagctatagacaccactcagctgttctccctccccaaggacttctgggaacaggaggttcgtgacattcggagctacctgacagagcaggtcaaccaggatctgcccaaagaggtgttggctgagcttgaggccctggagagacgtgtgcacaaaatgtga

SEQ ID NO: 388 - protein, 640 aa, Homo sapiens [sequence omitted]

SEQ ID NO: 389 - DNA, 1428 bp, Homo sapiens
  M15856
atggagagcaaagccctgctcgtgctgactctggccgtgtggctccagagtctgaccgcctcccgcggaggggtggccgccgccgaccaaagaagagattttatcgacatcgaaagtaaatttgccctaaggacccctgaagacacagctgaggacacttgccacctcattcccggagtagcagagtccgtggctacctgtcatttcaatcacagcagcaaaaccttcatggtgatccatggctggacggtaacaggaatgtatgagagttgggtgccaaaacttgtggccgccctgtacaagagagaaccagactccaatgtcattgtggtggactggctgtcacgggctcaggagcattacccagtgtccgcgggctacaccaaactggtgggacaggatgtggcccggtttatcaactggatggaggaggagtttaactaccctctggacaatgtccatctcttgggatacagccttggagcccatgctgctggcattgcaggaagtctgaccaataagaaagtcaacagaattactggcctcgatccagctggacctaactttgagtatgcagaagccccgagtcgtctttctcctgatgatgcagattttgtagacgtcttacacacattcaccagagggtcccctggtcgaagcattggaatccagaaaccagttgggcatgttgacatttacccgaatggaggtacttttcagccaggatgtaacattggagaagctatccgcgtgattgcagagagaggacttggagatgtggaccagctagtgaagtgctcccacgagcgctccattcatctcttcatcgactctctgttgaatgaagaaaatccaagtaaggcctacaggtgcagttccaaggaagcctttgagaaagggctctgcttgagttgtagaaagaaccgctgcaacaatctgggctatgagatcaataaagtcagagccaaaagaagcagcaaaatgtacctgaagactcgttctcagatgccctacaaagtcttccattaccaagtaaagattcatttttctgggactgagagtgaaacccataccaatcaggcctttgagatttctctgtatggcaccgtggccgagagtgagaacatcccattcactctgcctgaagtttccacaaataagacctactccttcctaatttacacagaggtagatattggagaactactcatgttgaagctcaaatggaagagtgattcatactttagctggtcagactggtggagcagtcccggcttcgccattcagaagatcagagtaaaagcaggagagactcagaaaaaggtgatcttctgttctagggagaaagtgtctcatttgcagaaaggaaaggcacctgcggtatttgtgaaatgccatgacaagtctctgaataagaagtcaggctga

SEQ ID NO: 390 - protein, 475 aa, Homo sapiens
  P06858
MESKALLVLTLAVWLQSLTASRGGVAAADQRRDFIDIESKFALRTPEDTAEDTCHLIPGVAESVATCHFNHSSKTFMVIHGWTVTGMYESWVPKLVAALYKREPDSNVIVVDWLSRAQEHYPVSAGYTKLVGQDVARFINWMEEEFNYPLDNVHLLGYSLGAHAAGIAGSLTNKKVNRITGLDPAGPNFEYAEAPSRLSPDDADFVDVLHTFTRGSPGRSIGIQKPVGHVDIYPNGGTFQPGCNIGEAIRVIAERGLGDVDQLVKCSHERSIHLFIDSLLNEENPSKAYRCSSKEAFEKGLCLSCRKNRCNNLGYEINKVRAKRSSKMYLKTRSQMPYKVFHYQVKIHFSGTESETHTNQAFEISLYGTVAESENIPFTLPEVSTNKTYSFLIYTEVDIGELLMLKLKWKSDSYFSWSDWWSSPGFAIQKIRVKAGETQKKVIFCSREKVSHLQKGKAPAVFVKCHDKSLNKKSG

SEQ ID NO: 391 - DNA, 1071 bp, Homo sapiens
  AF184174
atggacatggcggatgagccactcaatggaagccacacatggctatccattccatttgacctcaatggctctgtggtgtcaaccaacacctcaaaccagacagagccgtactatgacctgacaagcaatgcagtcctcacattcatctattttgtggtctgcatcattgggttgtgtggcaacacacttgtcatttatgtcatcctccgctatgccaagatgaagaccatcaccaacatttacatcctcaacctggccatcgcagatgagctcttcatgctgggtctgcctttcttggctatgcaggtggctctggtccactggccctttggcaaggccatttgccgggtggtcatgactgtggatggcatcaatcagttcaccagcatcttctgcctgacagtcatgagcatcgaccgatacctggctgtggtccaccccatcaagtcggccaagtggaggagaccccggacggccaagatgatcaccatggctgtgtggggagtctctctgctggtcatcttgcccatcatgatatatgctgggctccggagcaaccagtgggggagaagcagctgcaccatcaactggccaggtgaatctggggcttggtacacagggttcatcatctacactttcattctggggttcctggtacccctcaccatcatctgtctttgctacctgttcattatcatcaaggtgaagtcctctggaatccgagtgggctcctctaagaggaagaagtctgagaagaaggtcacccgaatggtgtccatcgtggtggctgtcttcatcttctgctggcttcccttctacatattcaacgtttcttccgtctccatggccatcagccccaccccagcccttaaaggcatgtttgactttgtggtggtcctcacctatgctaacagctgtgccaaccctatcctatatgccttcttgtctgacaacttcaagaagagcttccagaatgtcctctgcttggtcaaggtagacaattcaaagtctggagaagagggatcatgcctggatatgatctttagaaacaacaaaaatagaaaaaaataa

SEQ ID NO: 392 - protein, 356 aa, Homo sapiens
  Q96TF2
MDMADEPLNGSHTWLSIPFDLNGSVVSTNTSNQTEPYYDLTSNAVLTFIYFVVCIIGLCGNTLVIYVILRYAKMKTITNIYILNLAIADELFMLGLPFLAMQVALVHWPFGKAICRVVMTVDGINQFTSIFCLTVMSIDRYLAVVHPIKSAKWRRPRTAKMITMAVWGVSLLVILPIMIYAGLRSNQWGRSSCTINWPGESGAWYTGFIIYTFILGFLVPLTIICLCYLFIIIKVKSSGIRVGSSKRKKSEKKVTRMVSIVVAVFIFCWLPFYIFNVSSVSMAISPTPALKGMFDFVVVLTYANSCANPILYAFLSDNFKKSFQNVLCLVKVDNSKSGEEGSCLDMIFRNNKNRKK

SEQ ID NO: 393 - DNA, 103053 bp, Homo sapiens
  AJ277892
atgacaactcaagcaccgacgtttacgcagccgttacaaagcgttgtggtactggagggtagtaccgcaacctttgaggctcacattagtggttttccagttcctgaggtgagctggtttagggatggccaggtgatttccacttccactctgcccggcgtgcagatctcctttagcgatggccgcgctaaactgacgatccccgccgtgactaaagccaacagtggacgatattccctgaaagccaccaatggatctggacaagcgactagtactgctgagcttctcgtgaaagctgagacagcaccacccaacttcgttcaacgactgcagagcatgaccgtgagacaaggaagccaagtgagactccaagtgagagtgactggaatccctacacctgtggtgaagttctaccgggatggagccgaaatccagagctcccttgatttccaaatttcacaagaaggcgacctctacagcttactgattgcagaagcataccctgaggactcagggacctattcagtaaatgccaccaatagcgttggaagagctacttcgactgctgaattactggttcaaggtgaagaagaagtacctgctaaaaagacaaagacaattgtttcgactgctcagatctcagaatcaagacaaacccgaattgaaaagaagattgaagcccactttgatgccagatcaattgcaacagttgagatggtcatagatggtgccgctgggcaacagctgccacataaaacacctcacaggattcctccgaagccaaagtcaagatccccaacaccaccgtctattgctgccaaagcacagctggctcggcagcagtccccatcgcccataagacactccccttccccggtcagacacgtgcgggcaccgaccccatctccggtcaggtccgtgtctccagcagcaagaatctccacatcccccatcaggtctgttaggtctccattgctcatgcgtaagactcaggcatccaccgtggccacaggtcctgaagtgcctcccccttggaagcaagagggctacgtggcctcctcatctgaggctgagatgagagagacaacgctgacaacctctactcagatcaggacagaagagagatgggaagggagatacggtgtccaggagcaagtgaccatcagtggtgctgcgggtgctgccgccagtgtgtcggccagtgctagctacgcagcagaggctgttgccactggtgctaaagaggtgaaacaagatgctgacaaaagtgcagctgttgcgactgttgttgctgccgttgatatggccagagtgagagaaccagtgatcagcgctgtagagcagactgctcagaggacaaccacgactgctgtgcacatccaacctgctcaagaacaggtaagaaaggaagcggagaagactgctgtaactaaggtagtagtggccgccgataaagccaaggaacaagaattaaaatcaagaaccaaagaagtaattaccacaaagcaagagcagatgcacgtaactcatgagcagataagaaaagaaactgaaaaaacatttgtaccaaaggtagtaatttccgcagctaaagccaaagaacaagaaactagaatttctgaagaaattactaagaaacagaaacaagtaactcaagaagcaataagacaggaaactgagataactgctgcatccatggtggtagttgccactgcaaagtccacaaaactagaaacagtcccgggagctcaagaagaaactaccacacaacaagatcaaatgcacctaagttatgaaaagataatgaaggaaactaggaaaacagttgtacctaaagtcatagttgccacacccaaagtcaaagaacaagatttagtatcaagaggtagagaaggcattactaccaaaagagaacaagtgcaaataactcaggagaagatgagaaaggaagccgagaaaactgccttgtctacaatagcagttgctactgctaaagccaaagaacaagaaacaatactgagaactagagaaactatggctactagacaagaacaaatccaagttacccatggaaaggtggacgttggaaaaaaggctgaagctgtagcaacagttgttgctgcagtagaccaggcccgagtcagagagcccagagagcctgggcatcttgaagaatcctatgctcagcagaccactttggagtacggatataaggaacgcatttccgccgcaaaggtagctgagcctccccaacgtccagcctcagaaccccacgttgtccctaaagcagtcaagcctagagtaatccaggctccttctgagactcatatcaaaactactgatcaaaagggaatgcacatatcatcacagatcaagaaaactacagatctaacaacggaaagattagtccatgtggataaacgcccccgcacagctagccctcactttactgtttcaaaaatttctgttcctaagacagaacatggatatgaggcatcaatagccggtagtgctattgccacattacaaaaagagttgtcagccacatcttctgctcagaagatcaccaaatcggtgaaggctcctactgtgaagcccagtgagactagagtaagggcagagcccacacccttgccacagttccccttcgctgacacaccagatacttacaagagtgaagctggcgttgaggtgaaaaaggaagtaggggtgagcatcactggcaccaccgtccgtgaagagcgctttgaagtactgcacggacgcgaagccaaggtaacagaaacagcaagagtaccagcacctgttgaaattcctgttactccaccaactttggtctcgggcttaaaaaatgtgactgtcatagaaggtgaatctgtcaccttggagtgccacatctctggatacccatccccgacagtgacatggtacagggaagactaccaaatcgaaagttccattgacttccagataaccttccagagtggaattgctcgtcttatgattcgcgaagcatttgcggaagacagcgggcgatttacttgcagtgctgtaaatgaggctggaaccgtcagcacatcctgctacctggctgtgcaggtgtcagaagaatttgaaaaggaaaccacagccgtgactgagaaatttactacagaagagaaacgctttgttgagtcaagagatgtggttatgactgatactagcctcacagaggaacaagcagggcctggagaacctgccgcgccttactttattacaaaaccagtggtccagaaactggtggaaggtgggagcgtggtgtttggatgccaagttggcggcaacccaaagccccatgtatactggaaaaaatctggtgttcctctaaccactggatacagatacaaagtgagttacaacaaacaaaccggtgaatgcaagctggtgatttctatgacttttgctgatgatgctggagaatacactattgttgttcgcaataagcatggagaaacttctgcatctgcttccttgcttgaagaagctgattatgagttactgatgaagtcccagcaagaaatgctttatcagacacaagtgactgcatttgttcaagaacctaaagttggagaaacagcacctggatttgtatactctgagtatgaaaaagagtatgaaaaagaacaagccttaattaggaagaaaatggccaaagatactgtagtggtcagaacttatgtagaagatcaggaattccatatttcttcctttgaagagaggcttattaaagaaattgaatatagaataataaagactacattagaagaacttcttgaagaagatggagaagaaaagatggcagttgacatttctgaatctgaagctgttgaatcaggatttgatttaagaatcaagaattatagaattcttgaggggatgggtgtcacttttcattgcaagatgtctggatatccattaccaaagattgcttggtacaaagatggcaagcgcatcaaacatggagaaagataccaaatggactttctacaagatggcagagctagtctgcgtatacctgttgttcttccagaagatgaaggaatctacactgcatttgccagcaatattaaaggaaatgcaatttgctcagggaaattgtatgtggagcctgctgcaccacttggagctccgacttacattcccacactagagccagtgagcagaatcagatctctctctccacgttcagtgagcaggtctcctatacgcatgtctcctgcacggatgtcacctgcaaggatgtctcctgcacggatgtcccctgcaagaatgtcccctggacgtaggctggaggagacagatgagtcacaacttgagagactatataaaccagtctttgtgttaaaacctgtttctttcaaatgtttagaagggcaaactgccagatttgacttaaaggttgttggtagacctatgccagagacgttctggtttcatgatggccagcaaattgtcaatgactatacccataaagtagtcattaaagaagatggtactcaatcactaattattgtccctgccacacccagtgattctggggaatggactgtggttgcccaaaacagggcaggcagatcttcaatttcagtgattttaactgtggaagctgtggaacatcaggtaaaaccgatgtttgtagaaaaactgaaaaatgtcaatataaaggaaggttcccaacttgaaatgaaagtcagagctacgggtaaccccaaccctgacattgtatggttgaaaaacagtgacatcattgtgcctcataaatatcccaaaatcagaattgaaggaaccaagggagaagctgcccttaaaatcgattccactgtcagccaagattctgcctggtatactgcgactgctattaataaagctggcagagacactacaagatgcaaagtaaatgttgaagttgagtttgcagagcctgagccagagagaaagttaatcatcccacgggggacatatagagcaaaggagattgcagccccagaactggagcccctccatttgcgatatggccaagagcaatgggaagaaggtgatctctatgacaaagagaaacaacagaaaccatttttcaagaaaaaactcacttccttaagacttaagcgctttgggcctgcccactttgaatgcaggctaacacccattggtgacccaacgatggtggtggagtggctccatgatggaaagccacttgaagcagccaacaggctccgtatgatcaatgaatttgggtactgcagccttgattatggcgttgcatattctagagacagtggtatcattacttgcagagccactaacaaatatggaacagatcacacatctgctacccttattgttaaagatgagaaaagtcttgtggaagaatcccaattgcctgaggggaggaaaggcttacagagaattgaagaattagagagaatggctcatgaaggtgcacttacaggtgtaacaacagatcagaaagaaaagcaaaagccagacattgtcttgtacccagagccagttagagtacttgaaggggagactgcaaggttccgctgcagggtaacaggctaccctcagcccaaagtcaactggtacctcaatggacagctcatccgcaaaagcaaaaggttcagagttcgctatgatggtatccattacctggacatcgtggactgcaaatcatatgacacaggtgaagtgaaggtcaccgcggaaaatcctgaaggtgtgatagagcataaagtgaagcttgagattcaacagagggaagattttaggtctgtccttaggagagctcctgaaccaaggcctgagtttcacgtacatgaaccaggaaagcttcagtttgaagtacaaaaagtggatagacctgttgacaccactgaaaccaaagaagttgtgaagttgaaaagggctgaaagaattacccatgaaaaagtgcctgaagagtcggaagagctgcgcagtaaattcaagcgcagaacagaagagggctattatgaagccattaccgctgtggagctcaagtctcgaaagaaggatgaatcctatgaggaactcctcaggaagacaaaagatgaacttctccactggaccaaagagttaactgaagaggaaaagaaagctcttgccgaagaaggcaaaatcacgattccaacttttaaacctgacaagattgaactaagtcctagtatggaggctccaaaaatcttcgaaagaatccagagccaaacagtgggccaaggatctgatgcacacttccgggtcagagtcgtggggaaaccagaccccgaatgtgaatggtacaaaaatggtgtcaaaattgaacggtctgaccggatctactggtactggcccgaagacaatgtttgtgaattggtcataagagatgtgactgctgaggactctgccagcatcatggtaaaagccatcaacatagctggagaaacctccagtcacgcattcttacttgtccaagccaagcaattgatcactttcacacaggaattacaagatgttgttgctaaggaaaaagacactatggcaacctttgaatgtgaaacttcagaaccatttgtcaaagtgaaatggtataaagatggtatggaggttcatgagggagataaatacaggatgcactctgacagaaaggttcacttcctctccatactgaccattgatacgtctgatgctgaagattacagctgtgtacttgtggaagatgaaaatgtcaaaacgactgctaaacttattgttgaaggtgcagttgttgagtttgtgaaagaacttcaggacatagaagttccagaatcatattcaggagaattagagtgcattgtatccccagaaaatatagaaggaaaatggtatcataatgatgtggagcttaaatccaatggcaaatatacaattacatctcgtcgtggacgtcagaacctcacggtcaaggatgtaaccaaggaggaccagggagaatacagctttgtcatcgacgggaaaaagacaacctgtaaattaaagatgaaaccccgccccattgctatcctacaaggacttagtgaccaaaaagtctgtgagggtgacattgttcagcttgaagttaaagtctccttggaaagtgtggaaggcgtctggatgaaagacggccaagaagtgcagcccagtgacagggttcacattgtgatagacaaacaatctcatatgctgctcattgaagacatgactaaggaagatgctggaaattactctttcaccattccagcccttggcctctccaccagtgggcgtgtctctgtctatagtgtggacgtgataacacctctaaaagatgttaatgtgattgaaggcaccaaggctgtgcttgaatgtaaggtgtcagtccctgatgtgacttctgttaagtggtacttaaatgatgaacaaatcaagcctgatgaccgtgtacaggccattgtgaaaggtactaaacagcgactagtcattaaccgaactcatgcttcagacgaaggaccttacaagctgatagttggcagagttgaaaccaactgtaatctctctgtagaaaaaattaaaattatcagaggtcttcgtgaccttacctgtacagaaactcaaaatgtggtgtttgaggttgagctgtcccactctggaattgatgtcctgtggaattttaaggacaaggaaatcaagcccagttctaaatataaaattgaagcacatggaaaaatatataaattgacagttctaaatatgatgaaagatgatgaaggaaaatacacattttacgcgggagaaaatatcacatctggaaaacttactgtggcaggtggggccatctccaagccactcacagatcagaccgtagctgaatcccaggaagctgtgtttgaatgtgaagttgccaacccagattccaaaggcgaatggttgagggatggcaaacacctaccactgactaacaacatcagaagtgagtctgatggccacaaaaggagacttatcattgctgccaccaaattagatgacattggagaatatacctacaaggtggccacctccaaaacatctgccaaactcaaagttgaagctgtcaaaattaagaagactctgaagaacctcacagtgacagaaacacaggatgctgttttcactgtcgagcttacacaccctaatgtcaaaggtgtccagtggatcaaaaatggagttgtgctggaatccaatgaaaagtatgctatctctgtcaaaggaacaatttactctctgaggattaaaaactgtgccatcgtggatgagtctgtttatggcttcaggcttggaaggcttggagccagtgccagactgcacgtggagactgtcaagatcattaaaaagccaaaggatgtgacagccttggaaaatgccactgttgcctttgaagttagtgtttcccatgacactgttccagtaaaatggttccataagaatgtggaaattaagccaagtgacaaacacagactggtctcagaaaggaaagtccacaagctgatgctgcagaacatctccccctcagatgctggggaatacacagctgtggtcgggcaattggaatgcaaagcaaaactgtttgtggagacattacatattacaaaaaccatgaaaaatatcgaggtgcctgagaccaaaactgcctcttttgagtgtgaggtgtcccacttcaatgtcccttccatgtggctgaagaatggtgtggaaattgagatgagtgaaaagttcaagatagttgtgcagggaaaactccatcagctgatcatcatgaacaccagcacagaggactcggcagaatacacatttgtctgtggcaatgaccaagtcagtgccaccctgacagtcaccccaatcatgattacttccatgctgaaagacatcaacgctgaagaaaaagacactattacttttgaggtgacagtgaactatgaaggcatctcttacaaatggttaaagaatggtgtggaaatcaaatcaactgacaagtgccagatgagaaccaaaaagctcacacactcactgaacatcaggaatgttcactttggggatgctgctgactacacctttgtggctggaaaagcaacatcaacagccacactttatgtggaagctcgtcatatagaatttaggaaacacattaaggacattaaggtactggagaagaagcgagccatgtttgaatgtgaagtttctgaacctgacatcactgtacagtggatgaaagatgaccaggaactgcagatcacagacagaataaagattcagaaggagaaatatgtccaccgccttctgatcccatccacccggatgtctgatgctgggaagtacacagtggtggcaggaggcaacgtgtcaactgcaaaactctttgtagaaggcagagatgttcgcatccgaagtattaaaaaggaggttcaggtcattgagaaacagcgtgctgttgttgaatttgaggtcaatgaagacgatgttgatgcccactggtataaagatggcattgaaatcaatttccaagttcaagaacgacacaaatatgtagtggagagaagaatccaccgaatgtttatctctgagaccagacagagcgatgcaggagaatacacctttgtggcaggaaggaacaggagttctgtcactctctatgtcaatgctcctgaaccgccccaagttctgcaggagctccagcctgtcactgtgcagtctggcaagcctgcccgcttctgtgccgtgatatccggaagaccacagcccaaaatttcctggtacaaggaagagcagctgctttccactggcttcaagtgcaaatttcttcatgatgggcaagagtacacgcttttgctaattgaagccttcccagaggatgcggcagtctatacctgtgaagccaagaatgactatggtgttgccacaacatcagcttcactctcagtggaagttccagaagttgtgtctcctgatcaggaaatgcctgtttatccacctgccatcatcaccccgcttcaggacactgtcacttctgaagggcagccagcccgttttcaatgccgggtttctggaacagatctaaaagtgtcgtggtacagcaaagacaagaaaatcaagccatctcggttctttagaatgactcaatttgaagacacttatcaactggaaattgccgaagcttatccagaagatgaaggaacttacacgtttgttgctagtaatgctgtaggccaagtatcaagcacagccaacctgagtctggaagctcctgaatcaattttgcatgagaggattgaacaagagattgagatggaaatgaaagagttttctagttcttttctgtctgccgaggaagaaggacttcatagcgccgaacttcaattatctaaaataaatgaaacacttgaacttttgtctgaatctccagtttactcaactaaatttgattccgaaaaggaaggcactggcccaattttcatcaaagaagtgtcaaatgctgatataagcatgggggatgtggctacactgtctgtaactgtcattggcatccccaaacctaaaattcagtggttctttaatggagtgctattaaccccttctgctgactacaaatttgtttttgacggtgatgatcatagcctgatcattctgttcaccaaattggaggatgagggagagtatacatgtatggccagtaatgactatggaaagacaatatgtagtgcctatctaaaaattaattccaaaggagagggtcacaaagacactgaaacagaatcagcagtggcaaaatctctggaaaagctgggaggtccttgtcctcctcacttccttaaggagttaaaaccaattcgctgtgctcaagggcttcctgccatctttgagtacacagtggttggagagcctgcccctactgttacatggttcaaagaaaacaagcagctttgcaccagtgtttattacactatcattcataaccctaatggctctggaactttcattgtcaatgaccctcagagggaagacagtggcctctatatctgtaaagcagagaatatgttgggtgagtccacctgtgcagcagagctgcttgtgcttctggaagacacagacatgactgataccccctgcaaagcaaagtccacaccagaggctcctgaggattttccacagacacccttaaagggtcccgcagttgaagcacttgactcagagcaggaaattgcaacgtttgtaaaagacaccattttgaaagctgctttaatcacagaagaaaaccagcaactatcttatgagcatattgctaaagccaatgaattgagcagtcagcttcctttgggagctcaggaattgcaatccattttggagcaagacaagctcactcctgaaagcaccagggaatttctttgcatcaatggcagtattcactttcagcctctcaaggaaccatctcccaacctacagctgcagattgtacagtcccagaaaaccttctccaaagaaggtattctaatgcctgaagagcctgagacacaggcagttctatcagataccgagaaaatcttcccaagtgccatgtccatagaacaaattaattcattaacagttgagcctctgaaaactttattagctgaacctgaagggaattatccacagtcttcaatagaacctccaatgcattcttatctaacctctgtggctgaggaagtactttcaccaaaagaaaagacagtatctgacaccaacagagagcaaagagtgactcttcaaaagcaagaggcacaaagtgctctcatcttgagtcagagcttagctgagggacacgtggagagtctccagagtcctgatgtcatgatctctcaggtaaactatgagcccctagtcccttcagaacactcatgcacagaaggaggtaaaattttgatagaaagtgcaaatccactggaaaatgcagggcaagattctgcggtcagaattgaggaaggcaagtccttaagatttccactagcacttgaagaaaagcaggtactgctcaaagaagagcattctgacaacgtggtgatgcccccagaccaaatcattgagtctaaaagagagcccgtggcaataaagaaagtgcaggaggtacagggaagggaccttctttctaaggaaagcttgctttctggtattccagaagagcagagattaaacctgaaaattcaaatctgccgggctttgcaagcagctgtggccagcgagcagccaggtcttttctctgagtggctaagaaatattgaaaaggtggaggtcgaggctgtaaacatcacccaagagcccagacacatcatgtgcatgtaccttgttacttcggcaaagtctgtaacagaagaagtaaccatcattattgaagatgttgatcctcaaatggctaacctgaaaatggaacttagggatgctttgtgtgctattatatatgaggaaatagacatcctaacagctgagggtcctagaattcagcaaggagccaaaacaagtttgcaagaagaaatggattctttttcaggttcacagaaggttgaacccattactgaaccagaagttgaatctaaatatctgatctcacctgaagaggtcagttattttaacgtgcaaagtagggttaaatatttggatgccacacctgtcactaaaggggttgcttcagctgttgtctctgacgaaaaacaagatgagagtctgaaaccatcagaggaaaaagaggagtcttcctctgaaagtggtactgaggaggttgctacagtaaagatacaggaagctgagggtggcttcatcaaagaggatggccccatgatacatacacctttagtggacactgtttctgaggaaggtgatattgtacacctcacaacatccataacaaatgctaaagaggtgaattggtattttgagaataaactggtgccttcagatgaaaagttcaagtgtttacaagatcaaaatacatatacgctagtcatcgacaaagtaaataccgaagaccatcaaggagagtatgtctgtgaggccttgaatgacagcggaaaaacagcaacttcagccaaactcactgtagtaaaaagagctgccccagtgatcaagaggaaaatcgaacccctggaagtagcactgggccacctagccaaattcacctgtgagatccaaagtgctcccaatgtccggttccagtggtttaaagctggccgagaaatttatgagagtgacaagtgttctattcgatcttcaaagtatatctccagccttgaaatcctgagaacccaggtggttgactgcggcgagtatacatgcaaagcttccaatgagtatggcagtgtcagctgtacagccacactaactgtgacagaggcatatccaccaacctttctctccagacctaagtcccttacaacttttgtgggtaaggcagccaagttcatctgcacagtgacagggactcctgtgatagaaaccatttggcagaaagatggtgctgcactctcaccttcacctaactggaagatttccgacgcagaaaacaaacacattttagaactctcaaaccttaccattcaagatagaggagtttattcttgtaaggcttctaacaagtttggagcagacatctgccaagcagagttgatcatcattgataagccacatttcattaaagaattagagcctgtgcagtccgctatcaataagaaggtccaccttgagtgccaagtagatgaagacagaaaagtcacagttacgtggagcaaagatgggcaaaaactccccccagggaaagattataagatctgttttgaagataaaatagcaacacttgagattcctttggccaaactgaaagattcaggaacctatgtctgtacagcttcaaatgaggctggaagcagctcctgctcagccacagtcactgtcagagagccaccatccttcgtgaagaaggtggatccctcttatttaatgctcccaggtgaatcagcacgcctccattgcaagctgaaaggctcacctgtgatccaggttacttggtttaaaaataacaaagaactcagtgaaagtaacacagtccgaatgtattttgtcaattctgaggctatacttgatattacggatgtaaaagttgaagacagtgggagttactcatgtgaagcagtgaatgacgtcggcagtgatagctgcagtactgaaatagttatcaaagaacctccttctttcatcaaaactcttgagcctgcagacatagtgagaggaacaaatgctctacttcagtgtgaagtctcaggcactggaccatttgaaattagctggttcaaagacaagaaacaaattcgaagtagtaaaaaatacagattgttttctcagaagtctcttgtgtgtctggagatcttttcgtttaatagtgcagatgttggtgaatatgaatgtgttgttgctaatgaagtcggcaagtgtggctgcatggcaacccacttactcaaagaacctccaacctttgtaaagaaagtagatgatttgattgcactaggaggacaaaccgttaccctgcaagctgctgtgagagggtcagagcccatttctgtcacatggatgaaaggtcaagaggtcatcagagaagacggaaaaatcaaaatgagcttttccaatggtgttgcagtcttgataatccctgatgttcagattagttttggaggcaaatacacgtgcctggctgaaaatgaagctggaagccaaacatctgttggggaattaatagttaaagaacctgccaaaatcattgagcgagcagaactgatccaggtgacagcaggagatcccgccacactggagtacacagtggcaggcacgccagaactgaagcccaaatggtacaaagatgggagacccttggtcgccagtaaaaaataccgaataagttttaaaaacaatgttgcccagctcaaattttattcagctgagctgcacgacagtggccaatacacatttgagatttccaatgaagtgggcagcagctcctgtgagactacattcactgtattagatcgagacattgctccattttttaccaaacccttgcgcaacgtggatagtgttgttaatggtacctgcagactggactgcaaaattgcaggctccctccccatgagggtgtcctggtttaaggatggcaaagaaatagctgcttctgacagatacaggatagcatttgtggaaggcacagcctctttggagatcatcagagtagacatgaatgatgcagggaatttcacttgtcgagccacaaattccgtgggaagcaaagacagcagtggagccctgattgtgcaagaaccacccagttttgtaactaaacccggctcaaaggatgttctgcctggctcagcagtctgcctgaagagcactttccaaggatctactcctctcacaatcagatggtttaagggcaacaaagagctggtttctggtggaagctgctatattaccaaagaagctttagagagttccctggaactctatttagtaaaaacctctgattcgggcacgtacacatgtaaagtcagcaatgtcgctggaggggtggaatgcagtgcaaacttgtttgtaaaagaacctgccacatttgttgaaaagttagagccatcacagctgttaaagaagggagatgccacccagctagcctgcaaagtaactggtacccctccaattaaaataacatggtttgcaaatgatagagaaattaaggagagcagcaaacacagaatgtcttttgtggagtctactgcagttctaagactgacagatgttggcatcgaagacagtggtgaatatatgtgtgaggcccaaaatgaggctggcagtgaccactgcagtagcattgtaatagtcaaagagtcaccttattttaccaaggaatttaagccaattgaagtcttaaaggagtacgatgtcatgttgctggctgaggtggcaggcactcctccctttgagatcacttggttcaaagataacacaatcctgcgaagtggtagaaagtataagactttcattcaggatcatctggttagcctgcagatcctcaagtttgtagctgcagatgctggcgaataccagtgtcgggtgaccaatgaggtgggcagcagcatctgcagtgccagggtgactttaagagaacccccatccttcataaagaagatcgagagtaccagctccctccggggaggcacagctgccttccaggccactctgaagggctccttgccaattacggtgacttggctaaaagacagcgatgaaatcactgaagacgataatataagaatgacctttgagaacaatgtggccagtttgtacctcagtggcattgaagtcaagcatgatgggaaatatgtctgtcaggccaaaaatgatgcaggaatacaaagatgttctgcattactctcagtaaaagaacctgcaacaatcaccgaggaagctgtgtctatagatgtcacccaaggagacccagccactttgcaggttaaattttcagggactaaggagattacagccaaatggtttaaagatggccaagaactgaccctgggctcaaaatataaaatcagtgtcactgatacagtctcaatactgaagattatttctacagaaaagaaagatagtggagaatatactttcgaggtccaaaatgatgttgggaggagcagctgcaaggctagaattaatgtattagatcttatcatacctccttcattcaccaaaaagctgaagaaaatggacagcattaaaggttctttcattgatttagaatgtatagtggctgggtcacatcccataagcatccagtggttcaaagatgaccaagaaatatcagctagtgaaaagtacaaattctcttttcatgacaatactgccttcttggaaatcagccagctggaaggtacagacagtgggacatacacttgttctgccacaaataaggcagggcacaaccaatgcagtgggcatctgacagtcaaagaacccccttactttgtggaaaagccacagtcacaagatgtcaatcccaacacaagggtacagttaaaggctcttgtgggtggcactgcacccatgacaataaagtggtttaaagataacaaagagttacactcaggagcagcccgctcagtttggaaggatgacacctctaccagtctagagctctttgcagccaaagctaccgattctggaacctacatttgccaactaagcaatgatgttggcacagcaaccagcaaagccactctctttgtaaaagaacctcctcaattcattaagaagcccagtccagtcttagtgctgaggaatggacagtcaacaacatttgaatgccaaataacaggcactcctaaaatccgagtgtcttggtatctagacgggaatgaaataacagccattcagaaacatggcatttccttcattgatggtttagccactttccagatttctggtgccagggtagaaaatagtgggacttatgtgtgtgaagctcgaaatgacgcaggcacggcgagctgcagcattgaactcaaagtgaaagaaccccccacctttatcagagagctgaagcctgtggaggtagtaaaatatagtgacgtggagctggagtgtgaagttacgggaacacctccgtttgaagtcacttggctgaagaataacagggaaattcgaagcagcaaaaaatacacattgaccgacagagtgtctgtgtttaacctccatataaccaagtgtgacccttcagacactggggaataccagtgcattgtatccaatgaaggcggcagctgctcatgcagtactagagttgccctgaaagaaccaccatcattcattaagaagatagaaaataccactactgttttgaaaagttctgccacctttcagagtaccgtggcaggttctcctcctatttctataacctggctaaaggatgatcagattcttgatgaagatgataatgtctatatttcatttgtggacagtgtggccacacttcaaatcagaagtgtggataatggacacagtgggagatatacctgtcaagccaagaatgagtcaggagttgagaggtgttatgctttccttttagtacaagaaccagctcaaatcgtagagaaagctaaatcagttgatgttacggagaaagatcccatgaccttggaatgtgttgtggctggaacaccagaactcaaagtgaaatggcttaaagacgggaaacaaatagttcccagtagatacttttcaatgagttttgaaaataacgtggccagttttagaattcagtcagtaatgaagcaggacagcggtcagtacactttcaaggtggaaaatgacttcggaagcagtagctgtgatgcctacttaagagtgctagatcaaaatattcctccatcattcaccaaaaaattaaccaaaatggataaagttctgggctcttctattcatatggagtgcaaggtgtctggttcacttcccattagtgctcagtggtttaaggatggaaaagaaatatctacaagtgcaaaatacagacttgtgtgccatgagagatctgtgtctctggaagttaataatctggaattagaagatactgcaaattacacatgcaaagtgtcaaatgtagcaggagatgatgcatgcagtggcatcttaactgtgaaagaaccaccaagcttcctagtgaaacctgggcgacagcaagccatacctgattctacagtggaatttaaggcaatactaaaaggaacaccaccatttaaaataaaatggtttaaggatgatgtggaacttgtctcaggtcctaaatgtttcattggcttggaagggtcgactagcttcttaaatctctactcagtggatgcttctaagactggacagtatacttgccatgttaccaatgatgttggtagcgactcttgtactacgatgttgcttgtgacagaaccaccaaagtttgtaaagaaattagaagcctccaaaattgtgaaagcaggtgactcttcacgacttgaatgcaagatagctggatccccagaaatcagagttgtgtggttccgaaatgaacatgaacttccagccagtgataagtacagaatgactttcattgactcagtggccgtcatacagatgaacaatctcagtactgaggacagtggagatttcatttgtgaggctcagaatcccgctggcagcacaagctgcagtaccaaggttatagtaaaagagccacctgtttttagcagcttccctcctatagtagaaacccttaaaaatgctgaagtcagtcttgaatgtgaactttcgggaacaccaccgtttgaggtggtatggtacaaagacaagcggcaactcagaagcagcaagaaatacaagattgcatccaaaaacttccacacaagtattcacattctcaatgtggacacttcagacatcggtgaataccactgcaaagcacagaatgaagtgggaagtgatacttgtgtttgtactgtaaaattgaaagaaccaccaagatttgtctccaaactgaacagcctcactgttgtagccggagagcctgctgaattacaagcatccatagaaggcgcccagcctatttttgtccagtggcttaaagagaaggaagaagtgattagagaaagtgaaaacatcaggattacatttgtggaaaatgttgcaactctacagtttgcaaaagcagagccagctaatgctggaaagtatatctgccaaatcaagaatgatggtggaatggaggagaacatggccacactgatggtcttagagcccgcagtcattgttgagaaggcaggaccgatgacggtgactgtaggagaaacgtgcactctggagtgtaaggtggctggcactccggaactctctgttgaatggtacaaggatggaaagctgttgaccagcagccaaaaacacaaatttagcttctacaacaaaatctcttccttaaggattctctcagttgaaaggcaagatgcaggcacatacactttccaggttcaaaataatgttgggaaaagcagctgcacagctgtggttgatgtttcagaccgagcagttcctccctctttcacacgaagactgaaaaatactggtggggtgttaggtgcttcttgcatcttggaatgcaaagtagctggatcatcacctatttcagttgcctggtttcatgagaaaaccaagattgtcagtggagcaaagtaccaaaccacattttcagataatgtctgcacattgcagttgaattctctggattcctcagatatgggcaattacacatgcgtggctgctaatgtcgctgggtctgatgaatgtcgtgcagtgctaactgtacaagaaccaccctcttttgtgaaagaacctgaacctttggaagtactaccaggcaaaaatgtaaccttcacaagcgttattagaggaacccctccattcaaagtcaactggttcagaggtgccagagaactagtgaaaggagaccggtgcaacatctattttgaagacactgtggcagaactggaattatttaatattgacatatctcagagtggggaatacacctgtgtggtttctaacaacgctggccaagcatcttgcactacccgtctctttgtgaaagaaccagctgcatttttgaagagattaagtgatcattctgtagaaccagggaagtccataattctggagagcacctacactggaacacttccaatttctgtcacttggaaaaaggatggttttaacataactacctctgaaaaatgtaacatagtcacaacagagaaaacttgtatcctggaaattctgaatagcacaaaaagagatgcagggcagtattcctgcgagattgaaaatgaggcaggaagggatgtttgtggagctctggtatctacattagaaccgccttattttgttacggaactggaacctctggaggcagcagttggagattcggtttctttacaatgccaagttgctgggacaccagaaattacagtgtcttggtacaaaggagataccaaattacggccaactcctgaatacaggacctactttacaaacaatgtggccacacttgtttttaataaagtgaacatcaatgacagtggagagtacacatgcaaagcagaaaatagtataggaactgcttcttctaagactgtgttcagaattcaagagcgccaactcccaccttcttttgcaagacaattaaaggacattgaacaaactgtggggttacctgttacactcacttgtcgattaaatggctctgcacccatccaagtgtgctggtatagagatggagtacttttaagagacgatgaaaatctacagacttcatttgtagataatgtggcaactttaaaaattttgcaaactgacttgagtcactctggccagtactcttgctcagcttccaacccacttggaacagcatcttctagtgctagactcacagcaagagaacccaagaaatctcccttctttgacatcaagcctgtatctatagatgttattgctggagaaagtgctgattttgagtgtcatgttactggtgctcaaccgatgcgaatcacttggtcaaaagataacaaggagatccgtcctggaggaaactatacaatcacatgtgtgggaaacactcctcatttgagaattcttaaagtaggcaaaggagactctggtcaatatacttgccaagcaaccaatgatgttggcaaagacatgtgctcagctcagctcagtgtaaaagaacctccaaagtttgttaagaaattagaagcttcaaaagttgcaaagcagggagaatccattcaactggaatgtaaaataagtggctccccagaaatcaaagtttcatggttccgaaatgacagcgaacttcatgaaagttggaaatacaacatgtcattcattaattctgtggcattgcttacgatcaatgaagctagtgctgaagacagcggggactacatttgtgaggctcataatggtgttggtgacgccagctgcagcacagcgttgacagtgaaagcacctcctgttttcacccagaagccttctccagtaggagctcttaaaggttctgatgtgattctccaatgtgaaatttcgggaactcccccatttgaagtagtatgggttaaagatcgaaagcaagttagaaacagcaagaaatttaaaatcacttcaaaacattttgatacaagtcttcatatccttaatcttgaagcctccgatgtcggggaatatcactgcaaagctactaatgaggtgggaagtgacacgtgttcttgctctgtcaagttcaaagaacctccacgattcgtgaaaaagctaagtgacacctcaacccttattggggatgctgttgagttacgggccatagtggagggcttccagccaatttctgttgtctggctgaaagatagaggtgaagtcatcagagagagtgaaaataccaggatttcattcattgataacattgcaaccctccagctggggagtccagaagcatctaattctggaaaatatatatgccaaatcaaaaacgatgctggaatgagagaatgctctgcagtcttgactgtactagaaccagcaagaatcatagagaagcccgaacccatgactgtcactactggaaatccttttgcattagagtgtgtagtgactggaacaccagaactctcagccaagtggttcaaagatggaagagaattgtctgcagacagcaaacatcacattacattcatcaataaagtggcttcccttaaaatcccctgtgccgaaatgagtgacaaaggattatatagctttgaagtgaaaaacagtgttggcaaaagtaactgcactgtatccgtccatgtttctgatcggattgtgcctccttccttcatccgcaagctgaaagacgtgaatgccatcctgggggcctcagttgttttggagtgccgagtctctggctcagccccgatttcagttggctggtttcaggatggaaatgagattgttagtgggcccaaatgtcagtccagcttttcggaaaacgtctgtactttgaatctgagcttgttggagccctccgacacaggcatatacacgtgtgtggctgccaatgtagctggttccgatgagtgctcagcagtcctgactgtgcaagaaccaccatcttttgaacaaacccctgattctgtggaagttttgcctggaatgagcctcacattcaccagtgtcatcagaggcacccctcctttcaaggtcaagtggtttaaaggcagcagggaactggtgcctggggagtcatgcaacatctctctggaagattttgtcacagaactggagttgtttgaggtgcagccattagaaagtggagactattcttgcctcgttacaaatgatgctggcagtgcttcctgtaccacacatctttttgtgaaagaaccagccacctttgtgaaaagattggctgatttcagtgttgagacaggaagccccatagttctcgaggccacatacactggcacacctccaatctcagtgagctggataaaggacgagtatcttatttcacaatctgagagatgcagtattactatgacagaaaaatctaccatactggaaattcttgagagcacaatagaggattatgcacagtacagctgcctgatagaaaatgaggctggtcaagatatctgtgaagctctggtgtctgtcttagaaccaccgtactttattgaacctctggaacatgtggaagcagtcattggagaacctgcaactttacagtgtaaagtggatggaactccagaaattagaatttcttggtataaagaacacacaaagctacgatcagctcctgcatataaaatgcaattcaaaaataacgttgcttccttagtaatcaacaaagtggatcacagtgatgtgggagagtattcatgcaaggcagacaacagtgtgggggcagtcgcttcttcagctgtgcttgttatcaaagagcgcaaacttccacctttctttgcaagaaaactgaaagacgttcatgagactctaggcttcccagttgcatttgaatgccgcatcaatggctcagaacctcttcaagtgtcttggtacaaggatggggttcttttgaaagatgatgctaatttgcagacatcttttgttcataatgtagcaactcttcagattttacaaactgaccagagccacatagggcagtataattgctctgcttctaatcctcttgggactgcttcatccagtgccaagctcattctctcagagcatgaagtgcctcctttctttgatctaaagcctgtatcagtagatcttgctcttggagaaagtggtacttttaaatgtcatgtaactgggactgcaccaatcaaaatcacttgggccaaagataaccgagagattcgccctggaggcaactacaagatgactttggtagaaaatactgccactctgacagttctcaaagtaggcaaaggcgatgccgggcagtacacctgctatgcaagcaacatcgctggaaaagactcttgttctgctcatctgggtgtacaagaaccacccaggttcattaagaagctagaaccttcaagaattgtgaaacaggatgaattcacaaggtacgaatgcaaaatcggtgggtctccagaaatcaaagttttatggtataaggacgagactgaaattcaagagagcagtaaattcagaatgtcattcgttgactcggtggctgtgctggaaatgcacaatctcagtgttgaagacagtggagactacacctgtgaggcccacaatgcagcaggcagtgccagcagcagcacatccttaaaagttaaagaaccacccattttccgcaaaaagcctcatcctatagagacactgaaaggagctgatgttcaccttgaatgtgagcttcagggcactcccccatttcacgtttcttggtataaagacaagagagaacttaggagcggcaagaagtacaagataatgtctgagaacttccttaccagtatccacatcctgaatgtcgatgctgcagacattggggaatatcagtgtaaagccacaaatgatgtgggaagcgacacttgcgttggttccatcgctctcaaagcaccaccaagatttgtgaagaagctcagtgacatatctactgtcgttggtaaagaagttcagctgcagactaccattgaaggcgctgagcccatttcagtggtgtggttcaaagataagggagaaatcgttagagaaagtgacaacatatggatttcttattcagaaaacattgcaaccttacagttttcaagagtggaaccagccaatgctggaaaatacacttgtcagatcaaaaacgatgctgggatgcaagagtgcttcgccacgctatccgttctcgagcctgcaacaattgtagaaaagccagaatccataaaagttaccacgggagacacctgtaccttggagtgtacagtagctggcacccctgaactcagtactaagtggtttaaggatggaaaagagctaacaagtgacaacaaatacaaaataagcttcttcaacaaagtatctggccttaagatcatcaatgtagcaccgagtgacagtggggtatacagttttgaggtgcagaaccctgttggcaaagacagctgcacagcttcattgcaggtttcagaccgaaccgttcctccttcattcacaagaaaattgaaagagacaaatggtctatccggctcctcagttgtaatggagtgtaaagtctatgggtcacctccaatctctgtctcctggttccatgaaggaaatgagatcagtagtggaaggaaataccagaccaccctgacagataatacttgtgctttaactgtgaacatgctggaagaatcagacagtggtgactacacatgtatagctactaatatggctggttctgatgaatgtagtgctcctttgactgtgagagaaccaccatcttttgttcagaaacctgatcccatggatgttttaactgggaccaatgtaactttcacaagtatcgtaaaaggaacacctcctttcagtgttagctggttcaaaggtagcagtgaactagtaccaggtgacagatgcaacgtgtctttggaggattcagttgctgaactggagttgttcgatgtagatacatcacaaagtggagaatatacttgcatagttagcaatgaagctggcaaggcttcttgtacaacacatctctacataaaagccccagccaaatttgtgaagaggctgaatgattacagcatagagaaaggaaaacccctgatcctagagggtacattcactggaactcctcccatttcggttacctggaagaaaaatggcataaatgtaactccttctcagaggtgtaatataactacgactgaaaaatcggcaatcctggaaattccaagtagcacagtagaggatgcaggacaatacaactgctacattgaaaatgcctctggaaaagattcctgttcagcacaaatactcatactagaaccaccgtattttgtcaagcagttggagccggttaaggtgtctgttggagattctgcctctctacaatgccagcttgctggaacccctgaaattggggtatcctggtataaaggagatacaaaattgagacccactacgacttacaaaatgcattttaggaataatgttgctacactggttttcaaccaggttgatattaatgatagtggagaatatatctgcaaagctgaaaacagcgtgggagaagtttctgcatcaactttccttaccgttcaagagcaaaaacttccaccatcattttctcgacaattgagagatgttcaagaaacagttggactgccagttgtttttgattgtgccataagtggatcagaacctatctccgtgtcttggtataaagacggcaagccattgaaagacagcccaaatgtacaaacatcatttttagacaatacagccacactcaatatttttaaaactgaccggagccttgcaggccagtattcctgcacagctacaaaccctataggctctgcttcttccagtgccaggctcattctcacagaggggaagaacccacccttctttgacatccgtcttgcccctgtggatgctgtggtgggagaaagtgctgactttgagtgccacgtcacgggcacacaaccgataaaggtcagctgggccaaagacagcagagaaatacgaagtggcggaaagtaccagattagttatctggaaaacagcgcccacctgacagtcctcaaagtagacaaaggagattctggacaatatacctgctatgctgtgaatgaagtgggaaaagactcttgcacagctcagctgaatataaaagagcggctcatcccaccaagtttcactaaaagactctcagagacagtagaagaaacagaagggaattctttcaaacttgagggacgtgtggctggttcccaacctataactgttgcctggtacaaaaataatatagagatacaaccaacttctaactgtgaaataacattcaagaacaacacgttagtgctgcaagtcagaaaagcaggcatgaacgacgctggtttgtacacatgcaaagtgtccaatgatgcaggctctgctctgtgcacgtcttcaatcgtcatcaaagaacctaagaagccacctgtatttgatcagcaccttactccagtaacagtgagtgaaggagaatacgtgcagctcagctgccatgtccagggatctgagccaattaggatccagtggttgaaggctggcagggaaataaagccttcagacagatgcagcttcagctttgctagtgggacagctgtactggaactcagagatgtggctaaagcagattcgggagattatgtgtgtaaagcttcaaatgtggctggaagtgacactaccaaatcaaaagtgaccattaaagacaaaccagctgtggccccagcaaccaagaaagctgcggtagatggaagactcttttttgtgtcagaacctcagagtatcagagtcgtagaaaaaaccactgcgaccttcattgcaaaagttggaggtgacccaatcccaaatgttaaatggacaaaagggaagtggagacagctgaaccaaggaggtcgtgttttcatccaccaaaaaggcgatgaagcaaaactggagattagggacaccacaaaaactgattctgggttataccgatgcgtggcatttaacgaacatggtgaaattgaaagtaatgttaacttacaggtggatgaaaggaagaaacaagagaaaattgaaggcgatcttagagcaatgctgaaaaagactccaatcttaaagaaaggagctggagaagaagaggaaattgatatcatggaacttctcaaaaatgttgatcctaaagaatatgaaaaatatgcccgcatgtatggaatcactgacttccgaggtcttcttcaagcatttgaactgctcaagcaaagccaagaagaagagacacatagactggaaattgaggaaatagagaggtcagagagggacgaaaaggaatttgaggaacttgtatcatttattcagcaaagactgtcacagacagagcctgtcactctgatcaaggacattgaaaatcagacagttttgaaagataatgatgctgtctttgaaatcgacattaaaattaattatccagaaatcaagctttcatggtacaaaggaactgaaaaactggaacccagtgataaatttgaaataagcattgatggtgaccgacatacactcagagtcaaaaactgtcaacttaaagaccagggcaattatcgattggtttgtggtccacacatcgctagcgctaaactaactgtaattgagcctgcatgggaacggcatcttcaggatgtgactctgaaagaaggccagacttgcaccatgacatgccaattttctgtaccaaatgtaaaatctgaatggttcagaaatggcagaatccttaaaccccaaggtagacataaaacagaagtggaacacaaagtccataaattgaccattgcagatgttcgagcagaagaccagggtcagtacacctgcaaatatgaagaccttgaaacttcagcagaactcagaatcgaagctgaaccaattcagtttacaaagcgcatacagaacatcgtggtgagtgagcatcagtctgccacctttgagtgtgaagtgtcctttgatgatgccattgtaacatggtacaaaggaccaacagaactgacagagagccagaaatacaacttcaggaatgatggccgctgccattatatgaccatccacaatgtgaccccagacgatgaaggtgtctactcggtcatcgctcggctggagccaagaggtgaagcaagaagcacggcagagctgtacctaacgacgaaagaaatcaaacttgagctgaagcctcctgatattcctgactccagagttccaatcccaaccatgcctatcagagcagtgccaccagaagaaatccctcctgtggttgctcctcctatcccccttttgctaccaacacccgaagaaaagaaaccaccaccaaaacgtattgaagttaccaaaaaggctgtgaagaaagatgccaaaaaagttgttgcaaagcccaaagagatgacaccacgtgaagagattgtcaagaagcctccacctcctactaccttaattccagcaaaagctcctgaaatcattgatgtatcctctaaagctgaagaagtaaaaataatgactataaccagaaagaaagaggttcagaaagaaaaagaagctgtgtatgagaaaaagcaagcagtccacaaggagaagagagtcttcattgaatctttcgaagaaccttatgacgaactggaggtagaaccatacacagagccatttgaacaaccttattatgaagaaccagatgaagactatgaagagattaaggtagaagctaaaaaagaagttcacgaggaatgggaagaagattttgaagaagggcaagaatactatgaaagggaagaaggctatgacgaaggggaggaagagtgggaagaggcttaccaagaaagggaagtaattcaagttcaaaaggaggtctatgaagaatcacatgagagaaaagttccagccaaagtacctgaaaagaaagcaccaccacctcctaaagttataaagaagccagtaattgaaaaaattgaaaagacttctcgaagaatggaggaagaaaaagttcaagtcaccaaagtacctgaagtttcaaagaagattgttccacaaaaaccttcccggactccagtacaggaagaagttattgaagtgaaagtaccagctgtgcatacaaagaagatggttatttcagaagaaaagatgttctttgcttctcacacagaggaggaggtgtcagtcacagtccccgaggtacaaaaggaaattgttactgaagagaaaattcacgttgccgtttccaaaagggttgaaccaccacctaaagtccctgagctacctgagaaaccagctccagaagaagtggcccctgttcctatccctaaaaaagtggagcccccagcaccaaaagttcctgaggttcccaagaaacccgtgccagaggagaaaaagccagttcctgtgcctaagaaggaacctgctgctcccccaaaagtcccagaggtgccaaagaaacctgtccctgaagaaaagattcccgttcctgttgcaaagaaaaaggaagctcccccagctaaagttcctgaagtacagaagagagttgtgacagaagaaaaaataaccattgtaactcaaagagaggaatctccaccaccagcagtgccagaaataccaaagaagaaagttcctgaagaaaggaaacctgttcctcggaaggaggaagaagttccaccaccaccaaaagtgccagctctgcctaagaaacccgtcccagaggagaaagttgcagtgccagttcctgtcgctaagaaagctcctcctccccgagctgaagtctctaagaaaactgttgtagaagaaaagagatttgttgctgaagaaaaactatccttcgcagttcctcaaagagtggaagtcacgcggcacgaagtatctgcagaggaggaatggagttactcagaagaggaggaaggtgtgtccatttcagtttatagagaagaagaaagagaggaggaggaagaagcagaggttacagaatatgaagtgatggaagagcctgaggaatatgttgtggaagaaaagctgcacattatttctaagagagtggaagctgagccagctgaagtgacagagaggcaggagaagaaaattgtactgaaaccaaaaattcctgctaaaatagaggagcctccaccggctaaagttcctgaagcacctaagaaaattgtgccagaaaagaaagttcctgctccagttcctaaaaaggaaaaggtgcccccacctaaagtgccagaagagccaaagaaaccagttccagaaaaaaaggttcctccaaaagtcattaagatggaagaacctctcccagccaaagtgactgagaggcacatgcaaattacccaggaagaaaaagttcttgttgctgtaactaaaaaagaggcgcctccaaaagcaagagtgccagaggaaccgaagagagctgtcccagaagaaaaagttctgaaactcaaacctaaaagagaggaggaaccaccagctaaagtgactgaattcagaaaaagagtggttaaagaagaaaaagtatcaattgaagctccaaaaagagaacctcaacccatcaaagaagtaactataatggaagagaaagaaagggcttataccctagaagaagaagctgtttcagtacaacgggaagaagaatatgaggaatatgaagaatatgattataaagaatttgaggagtatgaaccaacagaagaatatgaccaatatgaagaatacgaggagcgggagtatgaacgatatgaagagcatgaagaatacatcacagaaccagagaagcctatccctgtaaagcctgtcccagaagaaccagttcccacaaaaccaaaggccccaccggctaaagtgctgaagaaagctgtccctgaagaaaaagtaccagtgcccattcctaagaaactcaaacctccaccacccaaagtgcctgaagaaccaaagaaagtttttgaggaaaaaatacgtatttcaattaccaaacgtgaaaaagagcaggtgactgaacccgctgctaaagtgcccatgaagcccaagagggttgtcgcagaagaaaaagtacctgtccctagaaaagaagtagcaccacctgttagagtgccagaagtgcctaaagaacttgaaccagaagaggttgcctttgaagaggaagttgtaacccatgtagaagaatatcttgtagaagaagaagaagagtacattcatgaagaagaggagttcataactgaggaagaagtggtgccagtgataccagtcaaagtgcctgaggtacccaggaaacctgttccagaagagaagaaacctgttcctgttcccaagaagaaggaagctccaccggcaaaagtgcctgaggttcctaagaagccagaggagaaagttcctgtgcttattcctaaaaaggagaagcctccgccagcaaaagttcctgaagtgcccaagaaacctgtgccagaggagaaagtaccagtaccagttcctaaaaaggtggaagctccacctgccaaagtgccagaggtacccaagaagcctgtgcctgagaagaaggtgccagttcctgctcctaagaaagtggaggctccacctgcaaaagtgccagaggtgcccaagaagctcatcccagaagaaaagaaaccaacacctgttccgaaaaaagtggaagcaccaccacccaaagtgccaaagaaacgtgaaccagttccagttcctgtagctctacctcaggaagaggaagttctatttgaagaagaaattgttcctgaagaggaagttctacctgaggaagaggaagttctacctgaggaagaggaagttctacctgaagaagaggaagttctacctgaagaagaggaaattccacctgaggaagaggaagttcctcccgaagaagaatatgtacctgaggaagaagaatttgtacctgaagaagaagtccttccagaagttaaacctaaggtgccagtacctgcaccagtgcctgaaattaagaagaaagtgacagagaagaaagtggtcattcccaagaaagaggaggctccccctgccaaagttcctgaggtgcctaagaaggtggaagaaaaacgaatcattctccctaaagaagaggaagttctaccagttgaagtgactgaggagcctgaagaagagcctatttcagaagaagaaatcccagaagaaccacctagcatagaggaagttgaagaggtggcaccacctagagtgcctgaagtgattaagaaagcagtacctgaagcacctactcctgttcctaaaaaagtggaggcaccaccagctaaagtgtcaaagaaaattcctgaggaaaaagtacctgttcctgttcagaaaaaagaggcacccccagccaaagtgcctgaagtaccaaagaaagtcccagaaaagaaagtccttgtgcctaaaaaggaagctgttcccccagctaaagggagaactgtccttgaagaaaaagtatcagttgccttccgccaagaagtagtagtaaaagaaagactagaattagaagtagtagaagcagaagtggaagaaattccggaagaagaagagttccatgaagttgaagaatattttgaagaaggcgagtttcatgaagtagaagaattcatcaaattagaacaacatagagttgaagaagaacacagagttgaaaaagttcatagggtaatagaagtttttgaggctgaagaagtggaagtatttgaaaaaccaaaagctccacctaaagggcctgagatatctgagaaaatcatccctccaaaaaaaccgcccactaaagttgttcctcgaaaagagccaccagctaaagtaccggaggtgcctaagaaaattgtggtagaagaaaaagtacgtgttcctgaagagcccagagttccaccaactaaagtgcctgatgtgctgccaccgaaggaagtggtcccagaaaagaaagtaccggtgcctcctgccaaaaagccagaagctccacctcctaaagtgcctgaggctcccaaagaagttgttcctgaaaagaaagtgccagtgcctcctcctaaaaagcctgaagtgccacccacaaaagtcccagaggtgccaaaggcagctgtcccagaaaagaaggtgcctgaagctattcctcccaaaccggaaagtcctccccctgaagtgccagaggctccgaaagaagttgttcctgaaaagaaagtgccagcggctcctcctaaaaagcctgaagtcacacctgttaaagtgcctgaggctcccaaagaagttgttcctgaaaagaaagtgccagtgcctcctcctaaaaagcctgaagtgccacccacaaaagtcccagaggtgccaaaggtagctgtcccagaaaagaaggtgcctgaagctattcctcccaaaccggaaagtcctccccctgaagtgttcgaggagcctgaggaagttgccctagaagagcctcctgctgaagttgtggaagagccagagccagcggcgcctccacaagtgaccgtaccacctaagaaacctgtcccagaaaagaaagcacctgctgtcgttgccaaaaaacctgaactaccaccagtgaaagtgcccgaggtgcccaaggaggttgttcctgaaaagaaggtgcctctggtggttcccaaaaagccagaagccccacctgctaaagtgcctgaagttccaaaagaagttgttccagaaaagaaagtagctgttcccaaaaagccagaagtcccaccagcaaaagtgccagaagtgccaaagaaacctgtcttggaagagaaaccagctgttcctgttccagaaagagcggagtctcctcccccagaagtatatgaagaacctgaggaaattgctcctgaagaggaaattgctcctgaagaggaaaagccagttcctgttgcagaagaggaggaaccagaggttccacctccagcagtgcctgaagagcccaagaagatcatcccagagaagaaagttcctgtcatcaaaaaaccagaagcaccgcctcctaaagaacctgaacctgaaaaggttattgagaagccaaaactcaaaccaagacccccacctcctccacctgctccacctaaggaagatgtgaaggagaaaatattccaacttaaagctattccaaagaagaaagttcctgaaaaacctcaggttccagaaaaagtggagcttacacctctgaaagtgcctggaggtgaaaagaaagttcgcaaattacttccggaacgtaaacctgaaccaaaggaagaagttgttctgaaaagcgttctaagaaaaagacctgaagaagaagaacctaaagtagaacctaaaaaactagaaaaagttaaaaaacctgcagtaccagaaccaccacctccaaaacctgttgaagaggttgaagtacctactgttacaaaaagggaaaggaagattcctgaaccaacaaaagtgcctgaaatcaagccagcaatacctctccctgcacctgaaccgaaaccaaagcccgaagcagaagtgaaaacaatcaaaccacctcctgtggaacctgaaccaacccccatcgctgccccagtaacagtgccagtggttggaaagaaagcagaagccaaagcacctaaggaagaggctgccaagccaaaaggtcctatcaaaggtgtacccaaaaagactccttcaccaatagaagccgaaaggagaaagttaaggccaggaagtggtggagagaaacctcctgatgaagccccgttcacctaccagctaaaggctgtgccactgaagtttgtgaaagaaatcaaagacatcatcttgacagaatcagagttcgttggctcttcagcaatctttgaatgtttggtctccccttccactgcaattacaacctggatgaaagacggtagcaatatccgtgagagtcccaagcacaggtttattgcagatggtaaagacagaaagctgcacatcattgatgttcaactttccgatgctggtgaatacacctgtgttttacgtttgggaaacaaagaaaagacctccacggctaaacttgttgtagaagaacttcctgtgcgttttgtaaaaacactggaagaggaagtcacagtggtcaaaggacagccattgtacttgagctgcgagttaaacaaagagcgtgacgtggtctggaggaaggatggcaagattgtggtggagaaacctggccgaattgtgccaggcgtcattggcttgatgcgggccctgaccatcaacgatgcagatgacacagatgctggaacatacacagttactgtggaaaacgccaacaacctggagtgttcatcttgcgtaaaagtagtagaagtcattagagattggctggtgaaacctatacgagaccagcatgtgaaacccaaggggacagctatttttgcctgtgatatagcaaaagatactccaaacattaagtggttcaaaggatatgatgaaatccctgcggaaccaaatgataagactgaaatactgagagatggaaatcatctgtacctcaaaattaagaatgctatgccagaagatattgctgagtatgcagtggaaattgaaggaaaaagataccctgcaaagctgacacttggagagcgtgaagttgaactgcttaaaccaatagaggacgttaccatttatgagaaagaaagtgcaagctttgatgcagaaatctcagaggcagacattcctggacaatggaaactgaaaggagaacttctaaggccctcacctacttgtgaaatcaaagcagaaggtggaaaacgcttcttaactttgcgcaaagtcaaactggaccaagctggtgaagtcctctaccaggcccttaatgcaattacaactgccattttgacagtaaaagaaatcgaacttgactttgctgtgcccctgaaggatgtcactgttccagaaaggcgacaggctcgattcgaatgtgtcctcacccgagaggcaaatgttatatggtccaaaggacctgatataattaagtcatctgacaaatttgatatcatcgctgatggaaagaaacatattcttgttattaatgattctcaatttgatgatgaaggggtctatactgctgaggtggagggcaagaagacctcagctcggttgtttgtcacaggtataagactgaaattcatgtcacctcttgaagatcaaacagtaaaagaaggtgaaacagcaacttttgtttgtgaactttctcatgaaaaaatgcatgtagtctggttcaaaaatgatgccaaactccatacaagcagaacagtactcatctcttctgagggcaagactcacaaattggaaatgaaagaagtgacattggatgatatatctcagataaaagctcaagtcaaggagctgagctccacagcacagctgaaggtcttagaggccgatccctacttcactgtgaaattacatgacaaaactgcagtggagaaggatgagattactttgaagtgtgaagtgagcaaagatgtaccagtgaaatggttcaaagatggtgaagagattgtcccttcacccaaatattctatcaaggcagatggcctgcgccgcatcttaaaaatcaaaaaggcggaccttaaagataaaggcgaatatgtgtgtgactgtggcacagacaagaccaaggcaaatgttactgttgaggctcgactaataaaagtggaaaagcctctgtacggagtagaggtgtttgttggtgaaacagcccactttgaaattgaactttctgaacctgatgttcacggccagtggaagctgaaaggacagcctttgacagcttcccctgactgtgaaatcattgaggatggaaagaagcatattctgatccttcataactgtcagctgggtatgacaggagaggtttccttccaggctgctaatgccaaatctgcagccaatctgaaagtgaaagaattgcctcttatcttcatcacacctctcagtgatgttaaagtcttcgagaaagatgaggctaagtttgagtgtgaagtatccagggagcccaaaacattccgttggctaaaaggaacccaggaaatcacaggtgatgacagatttgagcttataaaggatggcactaagcattcaatggtgatcaagtcagctgcttttgaagatgaagcaaaatacatgtttgaagctgaagataagcacacaagtggcaaactgatcattgaaggaatccggctcaaattcctcacccctctcaaagatgtaactgccaaagagaaggaaagtgctgtatttactgtggagttatctcatgataacatccgagttaaatggttcaagaatgaccagcgcctacacaccaccaggtcggtctcaatgcaagacgaagggaaaactcattcgatcacattcaaagacctgtctattgatgacacctcccaaattagagtagaagctatggggatgagttcagaagctaaactcactgtgcttgagggagacccatattttacaggaaaacttcaagattatactggtgtagagaaagatgaagttattctacagtgtgaaattagcaaagcagatgcaccagtgaaatggtttaaggatgggaaggaaataaagccatccaaaaatgctgttattaaggcagatggcaagaaacgcatgctaatcctaaagaaagccttgaaatcagatattggacagtacacctgtgactgtgggacagataagacctcaggaaaacttgacattgaggatcgggaaattaaactggtgcgacccctgcacagtgtggaggtgatggagactgagacagcacgctttgaaaccgaaatctctgaagatgatatccacgccaactggaaactcaagggagaggccctactccaaacacctgattgtgaaattaaggaagaaggcaaaatacactcccttgttttgcacaactgtcgcctggaccagacgggtggggtggatttccaagctgccaatgttaaatctagtgcccacctccgagttaagccacgagtaattggtcttctgaggcctttaaaggatgtcaccgtgactgcaggggaaacagccaccttcgactgcgagctctcctacgaagatatcccagtggaatggtatctcaaagggaagaaactagagcccagcgataaggtggtcccacgttcagaaggaaaagttcatacacttactctgagggatgtaaagttagaagatgctggggaagtccaactaacagcaaaagatttcaaaactcacgccaacctctttgtgaaagaacccccagttgaattcactaagcctcttgaggaccagacggtcgaagagggagccactgcagtgctggagtgtgaagtctccagagaaaatgctaaggtgaaatggttcaaaaatgggacagaaatcctcaaaagcaagaagtatgaaattgttgctgatggcagggtcagaaaacttgttatacatgactgtaccccagaggatattaaaacatacacttgtgatgctaaggattttaagacttcctgtaacctgaatgtcgtgcctcctcatgtggaattcttaagaccactcaccgaccttcaagttagagaaaaagaaatggctcgatttgagtgtgaactttcccgagaaaatgctaaggttaagtggtttaaagatggtgctgaaattaaaaagggcaaaaaatatgacatcatatccaagggagcagtgcgcattcttgtcatcaacaaatgtctactggatgatgaagctgaatattcctgtgaagtaaggacagcgagaacttctggcatgctgacagttctggaagaagaagctgtctttaccaaaaatcttgccaacattgaagttagtgaaacagacactataaaactggtttgtgaagtctccaaacctggcgcagaagtgatttggtataaaggggatgaggagatcattgaaacaggaagatatgaaatactgactgaaggacggaagagaatcctggtcattcagaacgctcaccttgaggatgctggcaactacaactgtcgactcccaagctctcgaaccgatggcaaagtcaaagtacatgaactggctgctgaatttatctcaaagcctcaaaaccttgaaatacttgaaggagaaaaggctgaatttgtctgctctatatcaaaagaaagctttccagtccagtggaagagggatgataagacacttgaatctggagataaatatgacgttattgctgatggtaaaaagagggtcctagttgtgaaagatgccacattacaagatatgggcacttacgttgtcatggtaggggccgccagagcagcagctcacttgacagtcattgaaaaactcaggatcgtagttcctcttaaggacacccgggtgaaggaacaacaggaagttgtcttcaactgtgaagtcaatactgaaggtgccaaagccaaatggttcagaaatgaagaagctatatttgatagttcaaaatacatcattctccaaaaagacctagtctacaccctcagaattagagatgcacacttagatgaccaagccaactataatgtgtctttgaccaatcacagaggtgaaaatgttaaaagtgcagccaatctaatagtagaagaggaagaccttaggattgttgagcctcttaaagatattgaaacaatggagaagaaatctgtcacattctggtgcaaggtgaatcgtctcaatgtaacactgaagtggaccaaaaatggtgaagaagtgccttttgacaaccgtgtctcatacagagttgataagtacaagcacatgttaaccattaaagactgtggcttcccagatgaaggtgaatacattgtcactgctggacaagataaatctgttgctgagcttctcatcatagaagccccgacagaatttgtggaacacttggaagatcagacagtcactgagttcgatgacgctgtcttctcctgccagctctccagagagaaagccaatgtaaaatggtacagaaatgggagagaaatcaaagaaggcaaaaaatacaaatttgaaaaagatggaagtatacacagactcattataaaagattgcaggctggatgatgagtgtgaatatgcttgcggggtagaagacaggaagtctcgtgctagactttttgtggaagaaattcctgttgagatcatcaggcctccacaagatattcttgaagcccctggtgctgatgttgtctttttagcagaactcaataaagataaggtggaagtccaatggctaagaaataacatggttgttgtccagggtgataaacaccagatgatgagtgaaggaaagatacatcgactacagatttgtgatattaagccccgtgaccagggtgaatacagatttattgccaaagacaaagaagccagagctaagcttgaactggcagctgcaccaaaaatcaagacagctgaccaagaccttgtggttgatgttggcaagcctctgacaatggtggtgccatatgatgcctaccccaaagcagaagctgaatggtttaaagaaaatgaacctttatctacaaaaaccattgatactacggctgaacaaacttctttcagaattttagaagccaagaaaggagacaaagggaggtataaaattgtgcttcagaacaaacatggaaaagcagaaggattcatcaatttaaaagttattgatgttcctgggccagtacgtaacttagaagtgacagaaacatttgatggtgaagtgagccttgcttgggaagaacctttaactgatggtggaagcaaaatcataggttacgttgttgaaagacgtgacattaagagaaagacctgggttctggccacagaccgtgcagagagttgtgagtttactgtcactggtctacagaaaggaggagttgagtacctattccgtgtgagtgcaagaaacagagttggcactggtgagccagtagaaactgacaatcctgtagaagcaaggagtaaatatgatgttccaggccctcctttgaatgtaaccatcactgatgtgaatcgatttggtgtctcactgacatgggaaccaccagagtatgatggaggtgctgagatcacaaactacgtcattgaattaagagacaagacttctatcaggtgggatactgccatgactgtgagagctgaagacctgtctgcaactgttactgatgtggtagaaggacaggagtacagtttccgagtgagagcccaaaatcgaattggagttggaaaaccaagtgcagccacacccttcgtcaaagttgctgatccaattgagagaccaagtcctcctgtaaacctaacttcctcagatcagactcagtcatcagttcagctcaaatgggaacctcctctgaaagatggaggaagcccaatattaggctatataattgagcgatgcgaagaaggaaaagataattggattcgttgcaatatgaaacttgtccctgaactgacttacaaggttaccggattggaaaaaggaaataaatatttatatagagtatctgcagaaaataaagctggtgtttcagatccatctgaaattcttggtcctctcaccgctgacgatgcatttgttgaaccaacaatggatttaagtgcatttaaagatggtctggaagttattgtcccaaatcctatcacgatcctggttccaagtacaggctatccaaggccaactgcaacctggtgttttggagataaagtactagaaacaggggaccgggtgaaaatgaagaccttgtctgcctatgccgaacttgtcatttctccaagtgaacgttcagacaagggcatttatacactgaaattagaaaaccgtgtgaaaacaatttctggggaaattgatgtcaatgtaattgctcgcccaagtgcacccaaagaattgaaatttggtgatataaccaaggactcagtacatttgacttgggaaccacctgatgatgatggaggaagtccgttaactggatacgttgttgaaaaacgagaagtcagccggaaaacatggactaaagttatggactttgtgactgatctagaattcacagttcctgatcttgttcaaggaaaagagtacttatttaaagtttgtgctcgtaacaaatgtggccctggagaacctgcatatgttgatgaacctgtaaatatgtcaactcctgcaacggtacctgacccaccagagaatgttaaatggagagatcgaacagccaatagcatcttcttaacatgggatccacctaaaaatgatggtggttcacgcatcaaaggatatatagttgaaagatgtccacgtggttctgataaatgggttgcctgtggagaacctgttgcagaaacaaaaatggaagtgacaggtcttgaggaaggcaaatggtatgcctaccgcgtgaaggccttaaacaggcagggtgctagcaaaccaagcagacccacagaggaaatccaggctgtggacacacaagaggccccagaaatcttcctcgatgtgaagctccttgctggtctcactgtaaaagctgggaccaagattgaacttcctgccaccgtaaccggaaaacctgaacctaaaataacttggacaaaggctgatatgattctgaagcaggacaaaagaattaccattgaaaatgtccctaagaaatccacagtgactattgttgatagtaagagaagtgacactggcacatatatcattgaggctgtgaatgtgtgtggccgggccactgctgtggtggaagtgaacgtcttagataaacccggaccaccagctgcctttgacatcacagatgtaaccaatgagtcatgtcttctaacatggaacccaccacgcgatgatggtggatctaagatcacaaactatgttgtggagagacgagcaactgatagtgaagtgtggcacaagctctcatccaccgtcaaggatacaaacttcaaggccaccaaattaatccccaataaagagtacatcttcagagttgctgcagaaaacatgtatggtgttggtgaaccagttcaggcctctccaataacagccaaatatcagtttgatccacctggtcctccaactcgcctagaaccttctgatatcactaaagacgcagtgactctcacatggtgtgagccagatgatgatggtggcagcccaatcacaggatactgggttgaaagactggatcctgatacagataaatgggttagatgcaataagatgccagtaaaggacacaacatacagagtgaaaggtctcactaataagaaaaaatacagattccgtgtgttggctgaaaatcttgctggacctggaaaaccaagcaaatcaactgaaccaatcttaataaaggatcccatagatcctccatggccccctggaaaaccaactgtaaaagatgtaggcaaaacatcagtaaggttgaattggacaaaaccagaacatgatggaggtgcaaagattgagtcttatgtcattgaaatgctgaagactggaacagatgagtgggtcagagtggcggaaggggttcccaccactcagcacttgctcccagggctcatggaaggacaggaatactcattccgagttagagctgtgaataaggctggggaaagtgaacccagtgaacccagtgaccctgtgctttgccgggagaagctatatcctccatcaccaccacgctggcttgaagttattaatatcacaaaaaatacagcagacctaaaatggacagttcctgagaaagatggagggtcccccatcaccaactacattgtggaaaagagagacgtcaggcgaaaaggctggcaaacagtggataccactgtcaaggacaccaagtgcacagtcaccccactgactgagggctctttatatgtgttccgagttgctgcagaaaatgctataggacaaagcgactacaccgaaattgaggactctgtgctggccaaagacacctttaccactcctggaccaccctacgccctggcagtggttgatgtgacaaaacgacatgttgacctaaagtgggagccacctaaaaatgatggtggaagaccaatacagagatatgtcattgagaagaaagaaaggttaggtacccgttgggtgaaagctggaaagactgcaggacctgactgtaacttcagagtaactgatgtcatcgaaggaacagaggtccagtttcaggttcgggctgaaaatgaagctggagttggccacccaagtgaacccacagaaatcctatccattgaagatccaacaagtcctccctcaccaccccttgacctacatgtgactgatgctgggagaaaacacattgccattgcttggaagcctccagagaaaaatggtggaagtcctatcataggataccatgttgaaatgtgtccagtaggcactgagaaatggatgagagttaattctcgcccaataaaggacttgaaattcaaggttgaagaaggtgttgttcctgacaaagaatatgtcctgagagtgagagcagtcaatgctattggtgtcagcgagccatctgaaatctctgaaaatgtggttgccaaagacccagactgcaagccaacaattgacctggagactcatgacattattgttattgaaggtgaaaagttaagcattcctgttcccttcagagctgtcccagttccaactgttagttggcataaagatggcaaagaagttaaagcaagtgatagattaacaatgaagaatgatcacatctctgcacaccttgaagttcccaagagtgtccgtgcagatgccggaatttataccattacactggagaataagctcggctcagcaacagcctcaatcaatgtcaaagtcataggcctacctggaccatgcaaagatattaaagcaagtgacattaccaagagttcttgtaagttaacttgggaacctccagaatttgatggtggaaccccaattcttcattatgtcctggagcgcagagaagctgggaggagaacatatataccagtcatgtctggtgagaacaaactgtcatggactgtgaaggatctcataccaaatggtgaatacttcttccgtgttaaagcagtcaacaaggttggtggaggagaatatattgaactgaaaaatccagtcattgctcaagatccaaagcaaccccctgatccacctgtagatgtagaggttcataatcctacagcggaggcaatgactattacatggaagccacctttgtatgatggagggagcaagataatgggctacatcatagagaagattgctaagggtgaagaaaggtggaagagatgcaatgaacacctggtaccaatcctgacctatacagcaaaaggacttgaagaggggaaagagtaccaattccgtgtgcgagcagagaacgccgcgggtattagtgaaccttctcgggctactcctccaaccaaagctgtagatcccattgatgcccccaaagtcattctgagaacaagcctagaagtgaaacgaggtgatgaaatagcacttgatgcaagtatttctggatcaccttacccaactattacatggataaaggatgaaaatgttattgtaccagaggaaattaagaagcgtgcagcacccttggttaggagaaggaagggtgaagttcaagaagaagaaccatttgtcctgcctctgacacagcgtttgagtattgacaacagcaaaaagggagaatctcagctacgcgtccgagattctctccgacctgaccatggtctgtatatgatcaaagttgaaaatgaccacggtattgcaaaagctccttgtactgtcagtgtgttagatacaccgggaccaccaatcaactttgtatttgaagatatcagaaagacctcagtcctttgtaaatgggaaccaccccttgatgatggtggcagtgaaatcataaactacactttggaaaagaaagacaagacaaaacccgactcagaatggattgttgtcacttcaacacttagacattgcaaatattcagtaacaaaactgattgaaggaaaagagtacctcttccgtgtaagagctgaaaacagatttgggccaggtccaccatgtgtttcaaagccacttgtggctaaagatccatttggaccacctgatgcaccagataagcccattgtggaagatgttaccagcaacagtatgctagtgaaatggaatgaaccaaaagataatggaagccccattttgggttactggcttgaaaaacgtgaagttaacagtacacattggtctcgtgtcaacaaaagccttctgaatgccttgaaagccaatgtagatggcttattagaaggactcacctatgtcttcagagtatgtgctgaaaatgcagctggacctggaaagttcagtccaccttcagatcccaaaacagcacatgatccaatctctcctcctgggccacctatcccaagagtcactgacacaagctctacaactattgaactagaatgggaacccccagctttcaatggtggtggggaaattgttggctattttgttgataagcagttggttggcacaaatgaatggtcacgctgcacagagaagatgatcaaggtccgtcagtacaccgtcaaagaaatccgagagggtgctgattacaaacttcgggtgagtgctgtcaatgccgcaggggaaggaccgcctggagaaacacaacctgttactgtggctgaaccacaagagcctccagctgtggaactggatgtttctgtcaagggtggaatacaaataatggctgggaagactcttagaattccagctgtggtgactggtcgccctgtacctacaaaagtatggaccaaagaagaaggggagctggataaagaccgtgttgtaatagacaacgttggaaccaaatctgaactaattatcaaggatgcactgcgaaaagaccatggcagatatgtgattacagctacaaatagctgtggttccaaatttgcagcagccagggtagaagtttttgatgtccctggtccagttcttgacttaaaacctgttgtaacaaacagaaaaatgtgtctacttaactggtctgatccagaagatgatggaggaagtgaaataacaggctttatcattgaaagaaaagatgccaagatgcatacttggagacaaccaatagagactgagagatctaaatgtgacatcacaggtctgcttgagggacaagaatataagttccgtgttattgccaagaacaagtttggctgtggccctcctgttgaaataggaccaattcttgcagttgatccactaggtcctccaacatctccagagaggctcacatacactgaaaggacaaagtccactatcacacttgactggaaagagccccgcagtaatggtggcagtcccatccaaggatatatcattgaaaaacggcgtcatgacaaacctgactttgaaagagttaacaagcgactctgcccaaccacatcttttctggttgaaaatcttgatgaacaccaaatgtatgagttccgtgtcaaagctgtcaatgaaattggtgaaagtgaaccatccctacctcttaatgtagtcatacaagatgatgaagtgcctccaactattaagttgcgtctgagtgttcgaggagacactatcaaagttaaggcaggagagcctgtccacatccctgcagatgtgacaggccttccaatgcctaagattgaatggtccaaaaatgaaactgtaattgaaaaacccactgatgcacttcagataaccaaggaagaggtatcccgaagtgaggcaaaaactgagcttagcattcccaaagcggtccgggaggacaaaggcacttacacagttactgcttccaatcgccttggctcagtgttccgaaatgttcacgttgaagtatatgaccgcccatccccaccaagaaatcttgctgttactgacattaaagctgaatcttgctacttgacatgggatgcccctcttgataatggtggcagtgaaatcacccattatgttattgacaaacgtgatgcaagtaggaagaaagcagaatgggaggaagtcaccaacactgctgtagagaaaagatatgggatctggaaacttatccccaatggtcagtatgagttccgagtcagggcagtgaataaatatggaatcagtgatgagtgcaaatcagataaagtagtcattcaagatccttatcgccttcctggacctccaggaaaaccaaaagttttggcacgcaccaaaggatcaatgctagtgagctggactcctcctttggacaatggtggctctccaattactggctactggctggagaaaagagaagagggaagtccttattggtcacgtgttagccgagcaccaataaccaaagtgggattgaaaggcgtggaatttaatgttcctcgtttgcttgaaggcgttaaataccagttcagagccatggcaataaatgctgcaggaattggtcctcccagtgaaccatcagatccagaggttgcaggagatcccatatttccaccggggccaccttcttgcccagaagttaaagataaaacgaagtcaagcatctcactaggatggaaacctccagccaaagatggtggcagcccaatcaaaggatacattgtagaaatgcaagaagaaggtactactgactggaaaagagtaaatgaaccagacaaacttataactacctgtgaatgtgtggtgcctaatctgaaagagctcaggaagtacagattcagagtgaaagctgtcaatgaagctggtgaatctgaaccaagtgatacaactggggagatccctgccactgatattcaagaggaaccagaagttttcattgacattggagcacaggactgtctggtttgtaaagctggctcacagattaggattcctgctgtcatcaagggacgcccaacaccaaaatcatcttgggaatttgatggaaaggcaaagaaagcaatgaaggatggagttcatgacatacccgaagatgcacagctggagactgctgaaaactcctcagtaattattattccggagtgtaaacgatctcatacaggcaaatacagcatcacagccaagaataaagcaggacaaaagactgcaaattgcagagttaaagtcatggatgtaccaggcccacccaaagatctgaaagtcagtgatatcacaaggggtagttgcagactttcatggaagatgccagacgacgatggaggagacaggatcaaaggctatgttattgagaagaggactattgatggaaaagcctggaccaaagtcaatccagactgtggaagcaccacatttgtagtgcctgatctcctctctgaacagcaatatttcttccgtgtgcgagcagaaaaccgttttggtattggcccacctgtggaaaccattcagaggaccactgccagagatccgatatatcctcctgatcctcctattaaactcaagattggcctcatcacaaagaacacagtgcatctgtcatggaaacccccgaagaatgatgggggctcccctgttacccactatattgttgagtgccttgcatgggaccctactgggacaaagaaagaagcctggaggcagtgcaataagcgtgatgtggaagaactgcaatttactgttgaagacctagtagaaggtggggaatatgaattccgagtcaaagctgtcaatgctgcaggagtcagcaagccttcagccactgttgggccctgtgactgtcaaagaccagacatgccaccatcaattgatctaaaagaattcatggaggttgaagaaggaaccaatgttaacattgtggccaaaattaaaggtgtgccattcccgacactaacctggtttaaagctcctccaaagaagcctgataacaaagaacctgttctctatgacacccatgtcaacaaactggtggtagatgatacttgcactttagttattccgcagtctcgcaggagtgacactggcttatataccatcacagctgtaaataatctgggaacagcatcaaaggagatgagactgaatgtcctgggtcgtcctggccctccagtgggacccataaaatttgaatctgtttcagcagatcaaatgacactatcttggtttccacctaaagatgatggtgggtctaagattacaaactatgtaattgagaaaagagaagctaacaggaagacatgggtccatgtctccagtgaacctaaggagtgcacgtacacgattcccaaattgctagaaggccatgaatatgtattccgaatcatggcccagaataaatatggcattggagaacctcttgacagtgaacctgaaacagcaagaaacctcttctctgtccctggagcaccagataaaccaacagttagcagcgtgactcgtaactccatgactgtcaactgggaagagccagaatatgatggaggctctcctgtgacagggtactggctggaaatgaaagacaccacttcaaagagatggaagagagttaaccgagatcctatcaaagccatgactttgggtgtttcttataaagtgactggtcttattgaaggttccgactatcaattccgggtatatgcaatcaatgctgctggcgtgggtccagcaagtctgccatcagacccagcgactgctagagatccaattgcccctcctggtcctccatttcccaaagtgacagattggactaaatcatctgcagatctggagtggtctcccccactaaaagatggtggatccaaagtaactggatacatcgttgaatataaagaagaaggaaaagaagaatgggaaaagggtaaagataaagaagtgagaggaacaaagctcgttgtgacaggattaaaggaaggagcattctacaaatttagagttagtgcagtcaacattgctggcattggagaacctggagaggtcacagatgtcattgaaatgaaggacagacttgtttcacctgaccttcagctagatgccagtgtcagagatagaattgttgtccatgctggaggggtgatccgaatcattgcctatgtgtctggaaagcctcctccaaccgtcacctggaacatgaatgaaagaaccttacctcaagaagccaccattgagaccacagccattagctcatccatggtcatcaagaactgccagaggagccatcaaggcgtctattctcttcttgccaaaaatgaagccggagaaagaaagaagacaattattgttgatgtattagatgttccaggtcccgttggaacaccattcctagctcacaacctaaccaatgagtcctgcaaactgacatggttttctccagaagatgatggaggctctccaatcaccaattatgtcattgaaaagcgtgaatctgaccgcagagcatggaccccagtgacatatacagttacccgacaaaatgctactgtccagggtctcattcaaggaaaagcctactttttccgaattgcggctgaaaatagtattggcatgggtccatttgttgagacatcagaggcacttgttatcagagagccaataactgtaccagagcgtcctgaagacctggaagtcaaagaagttactaaaaatactgtaactttgacttggaatcctcctaagtatgatggtgggtcagaaattattaactatgtcctagaaagtcggctcattgggactgagaagttccacaaagttacaaatgacaacttgcttagcagaaaatacactgttaaaggcttaaaagaaggtgatacctatgagtaccgtgtcagtgctgtcaacattgttggacaaggcaaaccatcattttgcaccaaaccaattacttgcaaggatgagctggcacccccaacgcttcacctcgacttcagagataagctcacgattcgagttggtgaagcttttgccctcactggccgttactcaggcaaaccaaagcctaaggtttcctggttcaaagatgaagctgatgtgctggaagatgatcgcactcatataaagactacaccagcaacacttgctttagagaagatcaaggccaaacgttcagattccggcaaatactgtgtggttgtggagaacagtacaggctctaggaaaggtttctgtcaagttaatgttgttgaccgtcctggaccaccagtaggaccagttagttttgatgaggtgaccaaagattacatggttatctcttggaagcctcctttagatgatggaggcagtaaaatcaccaattatattattgagaagaaggaagtgggtaaagacgtctggatgccagtgacatctgcaagtgctaaaacaacatgcaaagtttctaaactacttgaaggaaaagattatattttccggatacatgctgaaaatctgtatggaataagtgatcctctggtgtctgattcaatgaaagccaaagatcgtttcagggttcctgatgcacctgatcagccaattgttacagaagttaccaaagactctgcattagtaacctggaataagccacatgatggaggaaaacccatcacaaactacatcctggaaaagagagaaactatgtctaaacgatgggctagagttaccaaagatcctattcatccatacactaaatttagggttcctgatcttctagaaggatgtcagtatgaattccgggtttctgcagaaaatgaaattggtattggagatccaagcccaccatccaaaccagtctttgctaaagatccaattgctaaaccaagtccacctgttaatcctgaagcaatagatacaacatgcaattcagtcgatctaacttggcagccaccacgtcatgatggtgggagcaagattctgggttatattgttgagtaccagaaagttggagatgaagagtggagaagagccaatcacacccctgagtcatgtcctgaaactaaatataaagtcaccggtcttcgggacggtcaaacctataagtttagagtgttagcagtcaatgcagctggtgaatcagatccagctcatgttccggagccagtcctagtaaaagacaggcttgaaccccctgagttgattcttgatgccaacatggcaagagaacaacacattaaagttggtgatactctaagacttagtgccatcatcaaaggagtgccattcccaaaagtaacttggaaaaaagaagacagagatgctccaactaaagcaagaattgatgtgactccagttggtagcaagcttgaaattcgtaatgctgcccatgaagatggtggaatttattctttaacagtggagaatccagctggttcaaaaactgtctcagtaaaagtacttgtattagataaacctgggccacctagagatctggaagtcagtgaaattaggaaagattcatgttaccttacttggaaagaaccactggatgatggtggttctgttattaccaattatgtggttgagaggagagatgttgccagcgcccagtggtcacctctctcagctacatcaaagaaaaagagtcacttcgctaagcatctgaatgaaggcaaccagtacctcttccgagtagctgcggagaaccagtatggacgtggtccttttgttgaaacaccaaaaccaatcaaggctttggatcctctccatcccccagggccacccaaggacctgcaccatgtagatgttgacaagactgaagtctccctagtctggaataagccggatcgtgatggtggttctccaatcactggatatttggtagaatatcaagaagaaggcacccaggactggattaaatttaagactgtgacaaacttagagtgtgtggttactggactacaacaaggaaagacctatagattccgtgtaaaagctgaaaacattgtgggtcttggtctccctgacacaactatcccgatagaatgtcaagaaaaactagtgcctccatccgtggagctagatgtgaaattaattgaaggtcttgtggtaaaggctggaaccacagtcagattccctgctattataagaggtgtgcctgttcctactgcaaagtggacaaccgatgggagtgagattaaaaccgatgagcactacacagttgaaacagacaacttctcatcagtacttaccattaagaactgcttaaggagagacactggggaatatcaaatcacagtttccaatgcagccggtagcaaaacagtagccgtacatcttactgttcttgatgttcctgggccaccaacaggtcctattaatattctggatgttactcctgaacacatgactatctcatggcagccacctaaggatgatggaggaagccctgtgataaattatattgttgagaaacaagatacaaggaaagacacgtggggtgttgtctcttccggaagcagtaagacaaagctgaaaatcccacatctgcagaagggctgtgaatatgttttccgagttagagcagagaataagataggtgttggtcctccccttgactccacacctactgttgctaagcataaatttagtcctccgtctcctcctggtaaaccagtggttactgacattactgaaaatgcagcaacagtgtcttggaccctgccaaaatctgatggtggcagtccaataactggctactatatggaacgtcgagaagtaactggcaaatgggtgagggtcaacaaaacacctatcgctgacctgaagttcagagtgactggactctatgaaggaaatacatatgagtttagagtttttgctgaaaatcttgcaggactaagcaaaccatccccaagttctgatccaataaaagcttgccggcccatcaaaccacctggaccacctattaatcctaaactgaaagacaagagcagagaaacagctgatttggtgtggacaaagcctctcagtgatggtggtagccccattctaggatatgtagtggaatgtcagaaacctggcacggcacaatggaacaggattaataaagatgaactcattaggcaatgtgcctttagggtacctggactaattgaaggaaatgagtacagattccgtataaaggcagctaatattgtaggagagggtgagccaagagaactagcagaatctgtgattgcaaaagatatccttcatcctccagaagtagaacttgatgttacttgtcgtgatgttattaccgtgagagtaggccaaactatccgcattctagctcgagtcaaaggcagacctgaaccagacataacttggactaaggaaggcaaagtattggtccgagaaaagagggtggaccttattcaggatctacctcgtgttgagttacaaattaaagaagctgttagagctgatcatggcaagtatatcatctcagctaagaacagcagtggacatgcccaaggttcagccatcgttaacgtccttgacagacctgggccttgccagaatttgaaggttaccaatgtaaccaaagagaactgtacaatttcttgggaaaacccactagataatggtggctcagaaataacaaacttcatagtagaatatcgcaaaccaaaccagaaaggctggtcaattgttgcatcagatgtcactaaacgattaatcaaggccaaccttttagccaacaatgaatactatttccgagtttgtgcagagaataaagtaggtgttgggccaaccatcgaaacaaaaactcccattctggctattaaccctattgacagaccaggtgagcctgaaaaccttcacattgcagataaaggaaagacatttgtctatctaaagtggcggaggcctgactatgatggtggcagtccaaatctgtcatatcatgttgagagaaggcttaagggctccgatgactgggaaagagtgcataaaggaagcattaaagaaactcactacatggttgacagatgtgttgaaaaccagatttatgagttcagagtgcaaacaaagaatgaaggtggggaaagtgactgggtgaagacagaggaagttgttgtgaaagaagacttacaaaaaccagtacttgatctgaaattaagtggggtcctaactgtcaaagcaggggacaccattaggcttgaggcaggggttagaggcaaaccattcccagaagttgcatggaccaaggacaaagacgctacagacttaacaagatcaccaagggtcaagattgatacccgtgctgattcatctaaattttctcttactaaagcaaagcgaagtgatgggggtaaatatgtagttacggcaactaacacggctggcagttttgtggcctatgccactgtcaatgttttagataagcctggtcctgtgagaaatctgaaaattgttgatgtgtccagtgataggtgtactgtttgctgggatccaccagaagatgatggtggctgtgaaatccaaaattatattctagaaaaatgtgagacaaagcgaatggtttggtctacctattctgctactgtcttgacacctggtactacagtaacacgtctcatagaaggaaatgaatatattttcagagtccgtgcagaaaataaaataggcacagggcctccaacagaaagtaaaccagtcatagccaaaaccaagtatgataaacctggtcgccctgatcccccagaagtcactaaagtaagcaaagaagagatgactgtggtttggaatccacctgaatatgatggtggaaagtctataactggatactttttggagaaaaaggaaaagcattcaacacgatgggtccctgtcaacaagagtgcaatccctgagagacgtatgaaagtacagaatctcctcccagaccatgaatatcagttccgtgtcaaggcagaaaatgaaattggaattggagaaccaagcttgccttcaagaccggtggtggcaaaagaccccatagagccacctggtccaccaaccaatttcagagtggttgatacaaccaaacattccataactcttgggtggggaaaaccagtctatgatggtggtgcaccgatcattggatatgttgtggaaatgagaccaaaaatagcagatgcgtctcctgatgaaggctggaaacggtgtaatgctgcagcacagcttgtacgcaaggaattcactgttaccagcttggatgaaaaccaggaatatgagttcagggtgtgtgcccaaaaccaagttggtattgggcgccctgcagagctaaaggaagctatcaaacctaaagaaatactagaacctccggagattgatttggatgccagcatgaggaaactggtcatagtgagagcaggatgccctattcgtctctttgctatagtgagaggacgaccagcccctaaagtcacttggcgaaaagttggcattgataatgtggtcagaaaaggacaagttgatctggttgacactatggccttccttgtcatccccaattctacccgtgatgactcaggaaaatattccttaacacttgtgaacccagcaggagaaaaggctgtattcgtaaatgtcagagtattagacactcctgggcctgtgtctgatttaaaagtttcagatgtcactaaaacatcatgccatgtgtcctgggcccctcctgaaaacgacggtgggagccaagtgacacattatatcgtggagaaacgtgaggcagacagaaagacatggtcgaccgttaccccagaagttaagaaaacaagcttccatgtaaccaatcttgtccctgggaatgagtattacttcagagtaactgctgtcaacgaatatggccctggcgtcccaacagatgtcccaaaaccagtgcttgcatcagatcctctaagtgagccggatcccccaaggaaattagaagtgactgaaatgaccaagaacagtgccaccttagcctggttacctcccctacgtgatggaggtgctaaaatcgatggctacatcactagttacagagaagaagagcagcctgcagatcgctggacagagtactcagtggtaaaagatctgagccttgttgtcactggcctaaaggaaggaaagaaatacaaatttagagtagcggccagaaatgctgttggagtcagtttgccaagagaagctgaaggagtgtatgaagccaaagaacaactgttgccaccaaagatccttatgccagagcaaataactatcaaagctgggaaaaaactccgaattgaagcccatgtgtatggaaagcctcatcccacctgtaaatggaaaaaaggagaagatgaagttgtcacatccagccacctggcagtgcataaagcagacagctcttcaattctgatcataaaagatgtgactaggaaagacagtggttactacagcctcacagcagagaacagttctgggacagacactcagaaaatcaaagttgtagtcatggatgcccccggcccccctcagcctccatttgacatttctgatatagacgctgatgcttgctccctgtcatggcacatccctctggaggacggaggcagtaacatcaccaattatatagtggagaagtgtgatgtaagccgaggtgactgggtcacggctctagcttcagtcacaaaaacttcctgcagggttggaaagctgatcccaggccaggagtacatcttccgggtccgtgctgaaaaccgatttggcatttcagagcctctcacatctccaaagatggttgcgcagttcccatttggtgttcctagtgaaccaaagaatgcacgagtcaccaaagtcaacaaggactgtatttttgttgcttgggacagaccagatagtgatggagggagccccattattggttatctgattgaacgcaaggaaagaaacagtttgctgtgggtgaaagccaatgatactcttgtccggtcaactgaatatccttgtgctggccttgtagaaggtcttgagtattcattcagaatctatgccctaaacaaagctggatccagcccacccagcaaacccacagaatatgtaactgcaagaatgccagttgatcctcctgggaaacctgaggttattgatgtcaccaagagtactgtatctctgatctgggctcgtccaaagcatgatggaggcagtaaaattattggctatttcgtagaagcttgcaaacttcctggtgataaatgggtacggtgcaatactgcacctcaccagattccccaggaagagtacacagctactggcctagaagagaaagctcagtatcaatttagagctattgccaggaccgcggtaaacattagcccaccttctgaaccttctgatccagtgactatcctcgcagaaaatgtccctcccaggatagacctgagtgtggctatgaaatctttgcttactgtgaaagctggaactaatgtctgcttggatgctactgtttttggtaaaccgatgccaacagtttcttggaaaaaagatggcacactgctaaaaccagcagaaggcataaagatggccatgcagcggaatctgtgcaccttggagctattcagcgtgaaccggaaggactcaggagactataccattactgctgaaaattcaagtggttctaaatcagccaccattaagcttaaagtgttagataaaccgggtcctccagcatctgttaaaatcaacaaaatgtattcagatcgtgctatgctttcttgggaaccgcctcttgaagatggaggctcagaaatcaccaactatattgttgacaaacgtgaaacaagcaggcccaactgggctcaagtctctgcaactgtgcctatcaccagctgcagcgtggagaaacttatagagggccatgagtatcagttccgtatttgtgctgaaaataaatatggagtaggcgatccagtcttcactgaaccagcaattgccaaaaacccatatgacccaccaggacgctgtgatcctcctgttattagcaacataaccaaagatcacatgacagtcagctggaagccaccagcagatgatgggggctcacccatcactggctatttgcttgaaaagcgggaaacccaggctgttaactggactaaggtcaacagaaaacctattatagaaagaacattaaaagcaacaggtcttcaagaaggtaccgaatatgagttccgtgttacagctataaataaagctggaccaggcaaacccagtgacgcatccaaggccgcttatgctcgggaccctcagtatcctcctgcgccaccggctttccctaaagtatatgatacaactcgcagctctgtgagtctatcttggggcaagccagcctatgacggcggcagccctatcattggttatctcgttgaagtaaaacgggctgactccgataactgggtgaggtgcaacttaccacagaatctacagaaaacccgctttgaggttactggcctgatggaagacacacaatatcaattccgtgtgtatgccgttaataagattggatacagtgaccccagtgatgtgccagataaacactatcccaaggacatcttaattccacctgagggagaacttgatgcggacttaaggaagacactcatattacgtgctggagttactatgagactatatgtaccagtaaaaggacgcccacctccaaagattacttggtctaaaccaaatgtcaatctaagagacaggattggactggacataaagtcaactgactttgacactttcttgcgctgtgaaaatgtgaacaaatatgatgcaggaaaatatatcttaaccctggagaacagctgtggtaaaaaggaatataccattgttgtgaaagtgcttgatactcctgggccacctgtcaatgtgactgttaaggaaatatccaaagactctgcttatgttacctgggagcctcccattattgatggcggaagccccatcataaactatgtggtacaaaaacgtgatgcagagaggaaatcctggtctacagtgacaactgagtgctccaaaacaagcttcagagtagctaatttggaggagggaaaatcctacttcttccgagtgtttgctgaaaatgagtatggcattggtgatcccggtgaaactcgtgatgctgtcaaagcttcccaaactcctggaccagttgtggacctgaaagtgaggtctgtatctaagtcatcctgtagcattggctggaaaaagcctcacagtgatggtggaagtcggattattggatatgtagttgatttcctgactgaagaaaataagtggcaacgagttatgaaatccttaagcctacagtactctgcaaaagatttgactgaagggaaggaatataccttcagagtgagtgctgagaatgaaaatggagaaggaaccccaagcgaaatcactgttgtggcaagggatgatgttgtggctcctgatcttgacttaaagggtctacctgatttgtgctacttggctaaagaaaacagcaacttccggcttaagatccccataaaaggcaagccagctccatcagtctcctggaagaaaggggaagatcctctagcaactgacactagagtcagtgttgagtcatctgcggttaacacaactcttatagtgtacgattgccaaaaatctgatgctggaaaatacacaatcacacttaagaatgttgctggcaccaaggaaggaactatctccataaaggttgttggcaagcctggcatccccactggaccaatcaaatttgatgaagtcacagcagaagccatgaccttaaagtgggctcctccaaaggatgatggaggttctgaaatcaccaactatatcctagagaagagggattctgtgaacaacaagtgggtgacgtgcgcctcagctgtccagaaaaccacctttagagtaaccagacttcatgagggcatggaatataccttcagggtcagtgccgaaaataaatatggtgtaggggaaggcctgaaatcggagccaattgttgcgagacatccatttgatgtgcctgatgctcccccacctcccaatattgtggatgtcagacacgattcagtatctctaacttggactgaccccaagaaaactggtggttctccaattacagggtatcatctcgagttcaaggaaagaaacagccttttgtggaagagagctaacaagactccgataaggatgagagactttaaagtgacaggattaactgaaggtcttgaatatgaattccgagttatggcaatcaatttagcaggtgtgggcaagccaagcctaccatcagagcctgttgtggcactggacccaattgatcctcctggaaaacctgaggttattaacataacaaggaattcagtgactctcatttggactgaacctaaatatgacggtggtcataagttaactggatatatagtggagaagcgagatctaccttcgaagtcttggatgaaagccaaccatgttaatgtcccagaatgtgcctttactgtaactgaccttgttgagggtggaaaatatgaattcagaattagagcaaagaatacagcaggtgctatcagtgctccatcagaaagtacagaaaccattatttgcaaggatgaatacgaggcaccaacaattgtccttgatcccacaataaaagatgggctaacaattaaagcaggggataccattgttttgaatgccattagcattcttggcaaaccccttccaaaatcaagttggtccaaggcaggaaaagacattagaccatcagatatcactcagataacttcaaccccaacatcttccatgcttactatcaagtatgccactagaaaagatgcgggtgaatataccatcactgctaccaatccttttggcacgaaggtggaacatgtgaaggtaacagtccttgatgtacctggtcccccaggtcctgttgaaatcagtaatgtttctgctgaaaaagcaacacttacatggacacctcccttggaagatggcggctcaccaattaagtcctatatacttgaaaagagagaaaccagccgacttttgtggacagtggtttctgaagatattcagtcttgcaggcatgtggcaaccaaacttatccaaggaaatgagtacatcttccgggtctcagctgtaaaccactatggcaaaggagaacctgtacagtctgaacctgtcaaaatggtagacagatttggtccccctggccctcctgaaaaaccagaggtatcaaatgtcactaagaacactgccactgtcagctggaaaaggccagtggatgatggtggcagcgaaattacaggatatcatgtagaaaggagagaaaagaaaagcctgcgatgggtgagagcaataaaaacaccagtttccgatctcaggtgcaaagtaacaggactgcaagaaggaagcacctacgaattccgtgtcagtgcagaaaacagagcaggaattggtccacccagtgaggcttcagattctgttctgatgaaagatgcagcatatcctccaggaccaccttcaaatccgcatgtcactgatactaccaagaaatctgcttctttggcatggggcaagcctcattatgatggtggacttgaaatcactggctatgtcgtggagcatcaaaaagtaggagacgaggcctggataaaagataccacaggaaccgccctcagaatcactcagttcgttgttcctgatcttcagactaaagaaaaatacaacttcagaatcagtgccatcaacgatgcaggtgttggggagccagcggtgattccagatgttgaaatcgtagaacgggagatggctcctgattttgaactagatgccgagcttcgaagaacacttgttgttagagcaggactcagtattaggatatttgtgccaattaaaggtcgtcctgctcctgaagtgacatggaccaaagataacatcaacctgaaaaaccgagccaacattgaaaatacggaatcatttactcttctgattatcccagaatgtaacagatatgataccggtaaatttgtcatgaccattgaaaacccggctgggaagaaaagtggctttgtgaacgtcagagtcttggacacgccaggcccagtcctcaacctgcggcctacagacatcacaaaggacagtgtcaccctgcactgggacctccctctgatagatggaggctcacgtataacaaactacattgtagagaaacgtgaagcaacacggaaatcttattccacagccaccactaagtgccataaatgcacatataaagttaccggcttgtctgaagggtgtgaatatttcttcagagtgatggcagagaatgaatatggaattggtgagccaacagaaactacagagcccgtaaaagcctctgaagcaccatctccaccagacagccttaacatcatggacataactaagagcaccgtcagcctggcatggcctaagcccaaacacgatggtggcagcaagatcactggctatgtgattgaagcccaaagaaaaggctctgaccagtggacccacatcacaaccgtgaaagggttagaatgtgttgtgaggaatctaactgaaggagaggaatataccttccaagtgatggcagtgaacagcgcggggagaagtgcccctagagaaagcagacccgtcattgtcaaggagcagacaatgcttccagagctggatctccgtggcatctatcagaaactggtcattgccaaagctggtgacaacatcaaagttgaaattccagtgctcggtcgaccgaagcccacagtgacatggaaaaaaggagaccaaattcttaaacagacacagagagttaattttgaaaccacagcgacttcaaccattttaaatatcaatgagtgtgtcagaagtgatagtgggccctatccattaacagcaaggaacattgtaggagaggttggtgatgtcatcaccattcaagtccatgatatcccagggccacctactggaccaatcaaatttgatgaagtttcatctgattttgtaaccttctcttgggacccacctgagaacgatggtggtgtaccaataagcaactatgtagtggaaatgcggcagactgacagtactacctgggttgagttagcaaccaccgttatacgtactacctataaagccacccgccttactactggattagagtatcagttccgtgtaaaagctcagaatagatatggagttggaccaggcatcacatcagcatgcatagttgccaactatccatttaaggttcctggacctcctggtacccctcaggtaactgcagttaccaaggattcaatgacaattagctggcatgagccactttctgatggtggaagccccattttaggatatcatgttgaaagaaaagaacgaaatggtattctctggcagactgtgagcaaagctttagtaccaggcaacattttcaaatcaagtggacttacagatggtattgcttatgagttccgggtgattgcagaaaacatggcaggcaaaagtaagccaagcaagccatcagaacctatgttggctctggatcccattgacccacctggaaaaccagtacctctaaatattacaagacacacagtaacacttaaatgggctaagcctgaatatactgggggctttaaaattaccagttatatcgttgaaaagagagaccttcctaatggacggtggctgaaggccaacttcagcaacattttggagaatgaatttacagtcagtggcctaacagaagatgctgcatatgaattccgtgtgatcgccaaaaatgctgcaggtgccatcagtccaccatctgagccatctgatgctatcacttgcagggatgatgttgaggcaccaaagataaaggtggatgttaaatttaaggacacggttatattaaaagcaggtgaagcattcagactggaagctgatgtttcaggccgcccacctccaacaatggaatggagcaaagatggaaaagagctggaaggcacagcaaagttagaaataaaaattgcagatttctctactaatctggtaaacaaagattcaacaagaagggatagtggtgcctatacccttacagcgactaatcctggtggctttgctaaacacattttcaatgtcaaagttcttgacagaccaggcccacctgaaggacctttggctgtaactgaagtgacatcagaaaagtgtgtactatcatggttccctccactggatgatggaggtgccaaaattgatcattacatagtacagaaacgtgaaaccagcagattggcatggacaaatgtagcctcagaagtccaagtaacaaagctaaaggtcactaaactcttgaaaggcaatgaatacatattccgtgtcatggctgtaaataaatatggagtgggagagccactggaatcagagcctgtgcttgcagtgaatccttatggaccccctgatccgcccaaaaaccctgaagtgacaactattactaaagattcgatggttgtctgctggggacatcctgattctgatggtggaagtgaaatcatcaattatattgtggaacggcgtgataaagctggccaacgctggattaaatgcaacaaaaaaactcttactgatttaagatataaagtgtctggactgacagaaggacatgaatatgagttcaggattatggctgaaaatgctgctggaattagtgcaccaagtcctaccagtccattttacaaggcttgtgacactgtgtttaaacctggaccaccaggtaacccacgtgttctggatacaagcagatcatccatttcaatcgcttggaataaacctatctatgatggtggttcagaaatcactgggtatatggttgagattgccctgccagaggaagatgaatggcagattgtcactccaccagcaggactcaaggcaacttcgtatactatcactggcctcacagagaatcaggaatataagatccgcatctatgccatgaattccgaaggacttggggaacctgcccttgttcctggaactccaaaggctgaagacagaatgctgcctccagaaattgaactggatgctgacctgcgcaaagttgttactataagggcctgctgcaccctgagactttttgttcccatcaaaggaaggcctgcacctgaggtgaagtgggcccgggaccatggagaatctttagataaagctagcatcgaatccacaagctcttacaccctgcttattgttggaaatgtaaacagatttgacagtggcaaatatatactaactgtagaaaatagttcaggcagcaagtctgcatttgtcaatgttagagttctcgatacaccaggccccccacaggatctgaaggtaaaagaggtcactaagacatctgtcacactcacatgggacccacctctccttgatggaggttcaaaaatcaagaactatattgttgaaaagcgggaatcaacaagaaaagcatattcaactgttgcaacaaactgccacaagacttcctggaaggtagaccagcttcaagaaggctgtagctactatttcagggttctcgcagaaaatgaatatggcattgggctgcctgctgaaaccgcagaatctgtgaaagcatcagaacgacctcttcctccaggaaaaataactttgatggatgtcacaagaaatagtgtgtcactctcttgggagaaaccagagcatgatggaggcagccgaattctaggctacattgtggagatgcagaccaaaggcagtgacaaatgggccacgtgtgccacagtcaaggtcactgaagccactatcactggattaattcagggtgaagaatactctttccgtgtttcagctcagaatgaaaagggcatcagtgatcctagacaactgagtgtgccagtgatcgccaaagatcttgtcattccaccagccttcaaactcctgttcaatactttcactgtactggcaggtgaagacctaaaagttgatgttccattcattggccgccctaccccagctgtaacctggcataaagataatgtaccactgaagcagacaactagagtaaatgcagagagcacagaaaataattcactactgacaataaaggacgcctgccgagaagatgttggccattatgtggttaaactgactaactcagctggtgaagctattgaaacccttaatgttatcgttcttgacaaaccagggcctccaactggaccagttaaaatggatgaagtgacagctgatagtattactctttcctggggcccacccaagtatgatggtggaagttctatcaataattacattgttgagaaacgggacacttccacaaccacctggcaaattgtatcagctacagttgcaaggacaacaataaaggcttgcagactgaagactggatgtgaatatcagtttagaattgcagctgaaaacagatatgggaagagtacctacctcaattcagagcctactgtagcccaatatccattcaaagttcctggtcctcctggcactccagttgtcacactgtcctccagggacagcatggaagtacaatggaatgagccaatcagtgatggaggaagtagagtcattggctatcatctagaacgcaaggaaagaaatagcatcctctgggttaagttgaataaaacacctattcctcaaaccaagtttaagacaactggccttgaagaaggtgttgaatatgaatttagagtctctgcagagaacatcgtgggcattggcaagccgagtaaagtatcagaatgttatgtggctcgtgacccatgtgatccaccaggacggccagaggcaatcattgtcacaaggaattctgtgactcttcagtggaagaaacccacctatgacggtggaagcaagatcactggttatattgttgagaagaaagaattacctgagggccgttggatgaaagccagttttacaaatattattgacactcattttgaagtaactggcctagttgaagatcacagatatgagttccgggttatagcccgaaatgccgcaggagtgtttagtgagccttcagaaagcacaggagcaataacagctagagatgaggtagatccaccacgaataagtatggatccaaaatacaaagacacaatcgtggttcatgctggtgaatcattcaaggttgatgcagatatttatggcaaaccaataccaaccattcagtggataaaaggtgatcaggagctttcaaacacagctcgattagaaataaagagcaccgactttgccaccagtctcagtgtaaaagatgcagtacgtgtcgacagtggaaattacatactgaaggccaaaaatgttgcaggagaaagatcagttactgtgaatgtcaaggttcttgacagaccagggccacctgaaggacctgttgttatctcaggagttacagcagaaaaatgcacactagcttggaaacccccacttcaggatggtgggagtgacatcataaattatattgtggaaaggagagaaaccagccgcttagtttggactgtggttgatgccaatgtgcagactctcagctgcaaggttactaagcttcttgaaggcaatgaatatactttccgtataatggcagtaaacaaatatggtgttggtgaacctcttgaatctgagccagtagttgccaagaatccatttgtagtaccagatgcaccaaaagctccagaagtcacaacagtgaccaaggactcaatgattgttgtatgggaaagaccagcatctgatggtggtagtgaaattcttggatatgttcttgagaaacgggataaagaaggcattagatggacaagatgccataagcgtctgattggagagttgcgcctgagagtaactggactcatagaaaatcacgattatgagttcagagtttctgctgagaatgctgctggacttagtgaaccaagccctccttctgcttaccaaaaggcttgtgatcctatttataaaccaggacccccaaacaaccccaaagtcatagacataaccagatcttcagtattcctttcttggagcaaaccaatatatgatggtggctgtgaaattcaaggatacattgttgaaaaatgtgatgtgagtgttggtgaatggacaatgtgcactccaccaacaggaattaataaaacaaacatagaagtagagaagctgttggaaaagcatgaatacaacttccgtatctgtgctattaataaagctggagttggagaacatgctgacgtccctggacctattatagttgaagaaaaattagaagcaccagacattgatcttgacctagaactaaggaaaatcataaatataagggcaggtggctccttaaggttatttgttcctataaaaggtcgtcctacaccagaagttaaatggggaaaggtggatggtgaaatccgagatgcagctataattgatgtcactagcagtttcacctctcttgttcttgacaatgtcaaccgatatgatagtggaaaatatacgcttacattagaaaacagcagtggaacaaagtctgcctttgttactgtgagagttctggacacgccaagtccacctgttaacctgaaagtcacagaaatcaccaaagactcagtatcaattacatgggaacctcctttgttggatgggggatccaaaataaaaaattacattgttgagaaacgtgaagccacaagaaaatcatatgctgctgttgtaactaactgccataagaattcttggaaaatcgatcagctccaagaaggttgcagttattactttagagtcacagctgagaatgagtatggtattggccttcctgcccagactgctgatccaattaaggttgcagaagtgccacaacctcctggaaaaataactgtggatgatgtcaccagaaacagtgtctctctgagttggacaaaacctgaacatgatggtggcagtaaaatcattcagtatattgtggaaatgcaagctaaacacagtgagaaatggtcagagtgtgctcgagtaaagtctcttcaggcagtaattaccaacctaactcaaggggaagaatatctttttagagttgttgctgtaaatgaaaaggggagaagtgatcctcggtcccttgcagttccaatagttgccaaagatctggtaattgagccagatgtaaaacctgcattcagtagttacagtgtacaggttggccaagatttgaaaatagaagtgccaatttctggacgtcctaagccaaccattacctggactaaagatggtctcccactgaagcagaccacaagaatcaatgttaccgattcactggatctcaccacactcagtattaaagaaactcataaggatgatggtggacaatatggaatcacagttgccaatgttgttggtcagaagacagcatccatcgaaattgtaactctagataaacctgatcctccaaaaggacctgttaaatttgatgacgtcagtgctgaaagtattacattatcttggaaccctccattatatacagggggctgccaaatcaccaactacattgttcagaaaagagatacaaccaccacagtatgggatgttgtttctgctactgttgctagaactacactcaaagtgaccaaactgaaaactggtacagaataccaatttagaatatttgccgaaaacagatatggacaaagctttgccttagagtctgatccaattgtagctcaatatccctacaaagaaccaggccctccaggtacaccatttgccacagccatttccaaagactccatggtcatacagtggcatgaaccagtcaacaatggtggaagccccgtcataggttaccacctggagagaaaagaaagaaacagtattttgtggacaaaggtcaacaaaactattattcatgacacccaattcaaagcacagaatcttgaagaaggcattgaatatgaattcagagtgtatgctgaaaatattgttggtgtaggcaaagcaagcaagaattctgaatgctatgtagccagagatccctgtgacccaccaggaaccccagaaccaataatggttaaaagaaatgaaatcactttacagtggaccaaacctgtgtatgatggtggaagtatgattacaggctacattgtagagaaacgtgatttgcctgatggtcgttggatgaaagctagctttacaaatgtcattgaaactcaatttactgtgtcaggtcttactgaagatcaaagatatgaattcagagtcattgcaaagaatgcagctggtgcaataagtaaaccctctgacagtactggaccaataactgccaaggatgaggttgaactcccaagaatttcaatggatccaaaattcagagacacaattgtggtaaatgctggagaaacattcagacttgaggctgatgtccatggaaagcccctacctaccattgagtggttaagaggagataaggaaattgaagaatctgctagatgtgaaataaagaacacagatttcaaggctttacttattgtaaaagatgcaattagaattgatggtgggcagtatattttaagagcttccaatgttgcaggttctaagtcattcccagtaaatgtaaaagtattagatagaccaggacctccagaagggccagtccaggttactggagtcacttctgaaaaatgctctttaacatggtctccaccacttcaagatggtggcagtgacatttctcactatgttgttgaaaagcgagaaaccagtcgacttgcctggactgttgttgcttcagaagttgtgaccaattctctgaaagttaccaaactcttagaaggtaatgaatatgttttccgtataatggctgtcaacaaatatggtgttggagagcctttggaatctgcaccagtactaatgaaaaatccatttgtgcttcctggaccaccaaaaagcttggaagtcacaaatattgccaaagactccatgaccgtctgttggaaccgtccagatagtgatggtggaagtgagattattggttacattgtagagaaaagagacagaagtggcattcgatggataaaatgtaataaacgccgcattacagatttgcgtctaagagtgacaggattaacagaagatcatgagtatgaattcagggtctctgcagaaaatgctgctggagttggggaaccaagtccagctacagtttattataaagcctgtgatcctgtgttcaaacctggcccacctaccaatgcacacattgtagacaccactaaaaattcaatcacacttgcctggggtaaacccatctatgatggcggcagtgagatcttgggatatgtagtagaaatctgtaaagcagatgaagaagaatggcaaatagttactccacagactggcctgagagtcactcgatttgaaatttcaaaactcactgaacaccaagagtataaaatacgagtctgtgccctcaacaaagttggtttaggtgaggctacatcagttcctggtactgtgaaaccagaagataaacttgaagcacctgaacttgaccttgactccgaattaagaaaaggaattgttgtaagagctggtggatctgccagaattcacattccattcaaaggtcgtccaacgcctgagatcacttggtctcgagaggaaggtgaattcacagataaggtccaaattgaaaagggagtaaactatacccaactatcaatagataactgtgatagaaatgatgctggaaaatacattcttaagttggaaaacagcagtggatcaaagtctgcttttgtaactgtgaaagttcttgacactccaggaccaccacagaatttggcagtcaaagaagtgagaaaagattctgccttcctggtatgggagccacccatcattgatggaggggcaaaggtcaagaactatgtgattgacaaacgtgagtcaaccagaaaagcgtatgctaatgtgagtagtaaatgcagcaaaacaagttttaaagtggaaaaccttacagaaggagccatttattacttcagagtcatggctgaaaatgaatttggagttggtgttccagtggaaactgttgatgccgtgaaagctgctgaacctccttccccaccaggaaaggttacactcactgatgtgtcccagaccagtgcatcacttatgtgggagaaacctgaacatgatggcggtagcagagtcctggggtacgttgttgaaatgcagcccaaaggaactgaaaaatggagcattgtggctgaatccaaagtctgtaatgcagttgttactggtttgagttctggacaagaatatcagttccgtgtcaaggcttataatgagaaaggaaaaagcgatccaagagtgttgggtgttcctgtcatagccaaggacttgactatacagcctagtttaaagttaccatttaacacatatagtatccaagctggagaagatcttaaaatagaaattccagttataggccgaccaagacctaacatttcttgggtcaaagatggtgagcctcttaaacagacaacaagagtaaacgttgaagaaacagctacctcaactgttttgcacattaaagaaggtaacaaagatgactttggaaaatacaccgtaacggcaacaaatagtgcaggcacagcaacagaaaatctcagtgttatcgttttagaaaagcctggacctccagttggcccagttcggtttgatgaagttagtgcagactttgtagtcatatcttgggaacctccagcctatactggtggctgccaaataagcaactacattgtagagaagcgagatacaaccaccaccacttggcacatggtatcagcaacagttgcaagaacaacaattaaaataaccaaactgaaaacaggcacggagtaccagtttagaatttttgctgaaaacaggtatggaaaaagtgccccactggattctaaggcagttattgtacaatatccatttaaagaacctggaccacctggaactccttttgtgacatcaatctcaaaagatcagatgcttgtgcaatggcatgagccagtgaatgatggaggcaccaaaattattggctaccatcttgaacagaaagaaaagaacagtattttatgggtcaagttaaataagacccccattcaggacaccaaattcaaaacaactgggcttgatgagggccttgagtatgagttcaaagtttctgctgaaaatattgttggcattggcaagcctagcaaagtgtcagaatgctttgttgctcgtgatccatgtgacccacctggtcgccctgaagccattgttattacaagaaacaatgtcacactgaaatggaagaaacctgcctatgatggtggtagcaaaataacaggttatattgtagaaaagaaagatctacctgatggccgctggatgaaagccagctttaccaacgtattagaaactgaatttacagtgagtggacttgtagaagaccaaagatatgaatttagagtaattgcaagaaatgcagctggaaactttagtgaaccatctgatagtagtggtgccattactgcaagagatgaaattgatgcaccaaatgcctctctggatccaaaatataaagatgtcatcgttgttcatgcaggagagacttttgttcttgaagccgacatccgtggcaaacctatacctgatgttgtttggtcaaaagatggaaaagaacttgaagaaacagctgctagaatggaaattaaatctactattcagaaaacaactcttgttgtcaaagactgtatacggactgatggaggacaatatattctgaaactcagcaatgttggtggtacaaagtctatacccatcactgtaaaggtacttgacaggccagggcctcctgaagggcctctgaaagttactggagttactgcggaaaaatgttacctggcatggaacccacctttgcaagatggtggtgctaatatttcacattacatcattgaaaagagggagacaagccgactctcttggacccaggtttcaactgaggtacaggcccttaactacaaagttactaaacttcttcctggtaatgagtacattttccgtgtcatggctgtgaataaatatggaattggagagcccttggaatctgggcctgttacggcctgtaatccttataagccaccaggtcctccctcaacacctgaagtctcagcaatcaccaaagattctatggtagtaacatgggcacgcccagtagacgacggaggtaccgaaattgagggctacattcttgaaaaacgagataaggaaggcgttagatggaccaagtgcaacaagaaaacattaacggatctgcggctcagggtaactggtcttaccgaaggccattcctatgaattcagagttgctgctgaaaatgcagctggtgtgggagaacctagtgagccatctgttttctaccgtgcgtgtgatgccttgtatccaccaggtcccccaagcaatccaaaagtgacggacacttccagatcttctgtctccctggcatggagtaagccaatttatgatggtggcgcacctgttaaaggctatgttgtagaggtcaaagaagctgctgcggatgaatggacaacctgcactccaccaacaggattacaaggaaagcagttcacagtgaccaagcttaaagaaaacactgaatataacttccgtatttgtgccatcaattctgaaggtgtaggtgaacctgcaactctacctggctcagtggttgctcaggagaggatagagccaccagaaatagaactcgatgctgatctcagaaaggtggtcgttctgcgtgcaagtgctactttacgcttatttgtcactatcaaaggtcgaccagaacccgaagttaaatgggaaaaggcagaaggcattctcactgacagggctcagatagaggtgaccagctcatttacaatgttggtgattgataatgttaccagatttgacagtggtcggtataatctgacattagaaaataatagtggctccaaaacagcttttgttaacgtcagagttcttgactcaccaagtgcccctgtgaatttgaccataagagaagtgaagaaagactcagtgacgttgtcctgggaaccaccacttattgatggtggagctaagattacaaactacattgtcgaaaaacgagaaactacaagaaaagcctatgctaccattacaaataattgcactaaaactactttcagaattgaaaatctacaagaaggatgttcttactacttccgagtcttggcttccaatgaatatgggattggtttgccagctgaaacaacagaacccgttaaagtgtctgaaccacccctcccacctggaagagtaactcttgttgatgtgacccgtaatacagctacaattaagtgggagaaaccagaaagtgatggtggcagcaaaattactggttatgtggttgaaatgcagactaaagggagtgaaaagtggagcacctgcacacaagttaagactctagaagcaactatatctggcttaactgcaggagaagagtatgtcttcagggtagctgcagttaacgaaaagggaagaagtgatccaagacaacttggagtgccagtaattgcaagggatattgaaataaagccttcagttgagcttcctttccatactttcaatgtaaaggctagagaacaacttaagattgatgtgccattcaaaggaagacctcaagctactgtgaactggagaaaagatggtcagactcttaaagagacaactagagtcaatgtttcttcttcaaagactgtaacatcactatctattaaggaagcttcaaaggaagatgttggaacttatgaattatgtgtttcaaacagtgctggatccataacagttcctattactataattgtccttgacagaccaggacctccaggtcctatacgtattgatgaggttagttgtgacagcataaccatttcttggaatcctccagaatatgatggtggctgccaaattagcaattacattgttgaaaagaaagaaaccacctctacaacatggcacatagtttcacaagcagttgcaagaacatccattaaaatagttcgcctgacaacaggaagtgagtatcagttccgtgtttgtgcagaaaaccgctatggaaagagctcctacagtgaatcttcagctgttgttgcagagtatccattcagtcccccaggtcctcctggtactcctaaagttgtgcatgccacaaaatctaccatgcttgtaacctggcaagtgccagttaatgatggaggaagtcgagtaattggctatcatcttgagtataaagaaagaagcagcattctttggtcaaaagcaaataaaatcctcattgctgatactcaaatgaaagtctccggccttgatgaaggactgatgtatgagtatcgtgtatatgctgaaaatattgctggaattggtaaatgcagtaaatcttgtgaaccagtccctgcaagagatccttgtgaccctcctggacaacctgaagtcacaaatatcacaagaaaatcagtgtcacttaaatggtctaaaccacattatgatggtggagctaagatcacaggatacattgttgaacgcagagaactaccagatggccggtggctgaagtgcaattatactaatatacaagaaacatactttgaagtaactgaacttactgaagatcagcgttatgaattccgggtttttgcaaggaatgctgctgactcagttagtgagccatctgaatccactgggcctattatagttaaagatgatgttgagcctccaagagttatgatggatgtcaagttccgagacgttattgttgtcaaagctggagaggtccttaagataaatgcagacattgcagggcgacctctgccagtaatttcctgggccaaggatggtatagaaattgaagaaagagcaagaacagaaatcatctcaacagacaatcatactttgttaacagttaaagactgtataagacgagacactgggcaatatgtactaacactgaagaatgttgccggcactcggtctgtggccgttaattgcaaagtacttgataagcctggtccaccagcaggaccacttgaaataaatggcctcactgctgagaaatgctctctttcctggggacgtccccaagaagatggtggtgcagatatcgactattacatcgtagaaaaacgtgaaacaagccaccttgcatggacaatatgtgaaggagagttacagatgacatcctgtaaagtaaccaagttactcaaaggcaatgaatatatatttagagtaactggtgttaataaatatggtgttggtgagcccctagagagtgtagctataaaggcactagatccatttacagttccaagtccacccacgtctttggaaattacttctgtgaccaaagaatctatgacactttgctggtcaagacccgagagtgatggaggtagtgaaatatctggatatataattgaaaggcgagagaaaaatagcctaagatgggtgcgtgtaaacaaaaaaccagtttatgatctaagagtgaaatcaacaggacttcgggaaggatgtgaatatgaatatcgtgtttatgcagaaaatgctgctggcctaagtcttccaagtgaaacctctcccttaattagggcagaagatccagtgttcctaccatctcctccatccaaacccaaaattgtggactcaggcaagacaactataactattgcctgggttaagccgctgtttgatggtggggccccgataactggatatactgtagaatacaaaaaatctgatgacactgactggaaaacttccattcagagcttacgagggacagaatatacaataagcggactaacaacaggagctgaatatgttttcagagtaaaatctgtcaataaggttggtgctagtgaccccagtgatagctctgaccctcagatagcaaaggaaagagaagaagaacctttatttgatattgacagtgaaatgaggaagaccttgattgtcaaggctggtgcctcatttaccatgactgtgcctttccgaggaagaccagtacccaatgtcttgtggagtaagccagacactgacctccgtactagagcttatgttgataccacagactcccgtacatcactgaccattgaaaatgccaacagaaatgactctggaaagtacacattaacaattcagaatgttttgagtgctgcttcactgaccttagttgtcaaagttttagataccccaggtcctccaaccaacattactgtgcaagatgtaaccaaagagtctgcagtgttatcctgggatgttcctgaaaacgatggtggagcaccagtgaagaattaccacatagaaaaacgtgaggccagcaagaaagcatgggtctctgtgaccaacaactgtaaccgcctctcctacaaagttaccaatttacaagaaggagctatctattacttcagagtctctggagaaaatgagtttggtgttggtataccagctgaaacaaaggaaggagtaaaaataacagaaaaaccaagcccacctgaaaaacttggagtaacaagtatatccaaagacagtgtttccctgacctggctgaagcctgaacatgatggcggaagcagaattgtacactatgtcgttgaagcactagaaaaaggacagaaaaactgggttaaatgtgcagtggcaaagtcaacccatcacgttgtttccggtctgagagagaattctgaatactttttccgagtgtttgctgaaaatcaagctggcctgagtgacccgagagagcttctgcttcctgttcttattaaggagcaactagaaccacctgaaattgatatgaagaatttcccaagtcacactgtatatgttagagctggttcaaaccttaaagttgacattccaatctctggaaaaccacttcccaaagtgaccttatcaagagatggtgtcccccttaaggcaaccatgagatttaataccgaaattactgctgagaacctgaccatcaatctcaaagaaagtgttacagctgacgctgggagatatgaaatcactgctgccaactccagtggtacaaccaaagctttcattaacattgttgtgctagacaggcctggtcctccaactggccctgttgttattagtgatataactgaagaaagtgtgactctcaaatgggagccacctaagtatgacggtggaagtcaagttaccaactacattctactcaaaagagaaacaagtactgcagtgtggactgaagtgtctgcaacagttgcaagaaccatgatgaaagtcatgaaactgaccacaggagaagaataccaattccgcatcaaggcagaaaaccgctttggcatcagtgatcatatagattcagcttgtgtgactgtcaaactaccatacacaacacctggaccaccatctacaccatgggtcactaatgttactcgagaaagcatcactgtgggctggcatgaaccagtgtcaaatggaggcagtgcagtcgtaggctatcacctggaaatgaaagacagaaacagtattttatggcaaaaagccaacaaactggtcatccgcacaactcacttcaaagtcacaacaatcagtgctggacttatttatgaattcagggtgtatgcagaaaatgctgctggagttggaaaacctagccatccttctgaaccagtcttggcaattgatgcttgtgaacccccaagaaatgttcgtatcactgatatttcaaagaactctgtcagcctttcatggcaacaaccagctttcgatggaggtagcaagattacaggctacattgttgagagacgtgaccttccagatggcagatggaccaaggccagcttcaccaatgttactgaaactcaattcatcatctctggcttgactcagaattcccagtatgaattccgtgtctttgctaggaatgctgttggttccattagcaatccatctgaggttgtagggcccattacttgcatcgattcttatggtggtcctgtaattgatttgcctctagaatatacagaagttgtcaaatacagagcaggtacatctgtgaagctcagagctggcatttctggcaaacctgcgcctactattgagtggtataaagatgataaagaattacaaaccaatgcactggtgtgtgttgaaaataccacggacctcgcatctatactcatcaaagatgccgatcgccttaatagtggatgctatgaattaaaactaaggaatgccatgggctcagcctcagccaccatcagagtacagatccttgacaaaccaggcccacctggtggaccaattgaatttaagactgtaactgctgagaagatcacccttctctggcggcctccagctgatgatggtggtgcaaaaatcactcactacattgtggaaaagcgtgagacaagccgcgttgtgtggtctatggtgtctgaacatttggaagagtgcatcattacaaccaccaaaattatcaaaggaaatgaatacatcttccgggtccgagccgtgaacaaatatggaattggcgagccactggaatctgattccgttgtagccaagaacgcatttgttacacctgggccaccaggcataccagaagtgacaaagattaccaagaattcgatgactgttgtatggagcaggccaattgcagatggcggtagtgatataagtggctatttccttgaaaaacgagacaagaagagcctaggatggtttaaagtactaaaagagactatccgtgacaccagacaaaaagtaacaggactcacagaaaacagtgactatcaatacagagtttgtgctgtaaacgctgctggacagggtccattttctgaaccatctgaattctacaaagctgctgatcctattgatcctccaggtccacctgctaagataagaatcgcagattcaaccaagtcatccatcacccttggctggagtaagcctgtctatgatgggggcagtgctgttactgggtatgttgtcgagataagacaaggagaggaagaggaatggactactgtctctaccaaaggagaggtcagaactacagaatatgtggtatccaacctgaaacctggagtcaattactacttccgggtatctgctgtaaactgtgctggacaaggagaacctatagaaatgaatgaacctgtacaagctaaagatatacttgaggcaccagagattgacctggatgtggctctcagaacttctgttattgccaaagctggtgaagatgtacaagtgttgattccctttaaaggcagacctccacctactgtcacatggagaaaagatgagaagaatcttggcagtgatgccagatacagcattgaaaacactgattcatcctcattactcaccattcctcaagttactcgcaatgatacaggaaaatatattctcacaatagaaaatggagttggtgaacctaagtcttcaactgtgagtgttaaagtgcttgacacaccagctgcctgccagaaactacaggttaaacatgtttctcgaggcacagtcactttgctctgggatcctcctctcattgatggaggatctccaataattaattatgtcattgaaaagagagatgccaccaagagaacatggtctgtcgtgtcacacaaatgttctagcacatccttcaagctaatagatttgtcggagaagactccattcttcttcagagttcttgcagaaaatgaaattggaattggggaaccctgtgaaactacagagccagtgaaggctgctgaagtaccagctcctatacgtgatctctcaatgaaagactcaacaaagacatctgtcatcctcagctggaccaaacctgactttgatggtggtagcgtcatcacagaatatgttgtagaaaggaaaggtaaaggtgaacagacgtggtcccacgctggcataagtaagacatgtgaaattgaggttagccaacttaaggagcagtcagtcctggagttcagagtgtttgccaaaaatgagaaaggactgagtgatcctgtcactattgggccaattacagtgaaagaacttattattacacctgaagttgacctgtcagatatccctggggcacaagtcactgtgagaattgggcacaatgtgcaccttgaattaccttataagggaaaacccaaaccatccatcagttggctgaaagatggcttgccactgaaagaaagtgaatttgttcgcttcagtaaaactgaaaacaaaattactttgagtattaagaatgccaagaaggagcatggaggaaaatacactgttattcttgataatgcagtgtgtagaattgcagtccccattacagtcatcacccttggcccaccatcaaagcccaaaggacccattcgatttgatgaaatcaaggctgatagtgtcatcctgtcatgggatgtacctgaagataatggaggaggagaaattacttgttacagcatcgagaagcgggaaacttcacaaactaactggaagatggtgtgttcaagtgttgccagaacgactttcaaagttcctaatctagtcaaagatgctgagtaccagtttagagtgagagcagaaaacagatacggagtcagccaaccacttgtctcaagcattattgtggcaaaacaccagttcaggattcctggtcccccaggaaagccagttatatacaatgtgacttctgatggcatgtcactaacttgggatgctccagtttatgatggtggttcagaagttactggattccatgttgaaaagaaagaaagaaatagcatcctctggcaaaaagttaatacatcaccaatctctggaagagaatatagagccactggactggtagaaggtctggattaccaattccgtgtatatgctgaaaattctgctggcctaagctcacctagtgacccaagcaaatttaccttagctgtttctccagtagacccacctggcactcctgactacattgatgtcacccgggaaaccatcacacttaaatggaacccaccattgcgtgatggaggcagtaagattgtgggctatagcattgagaaacggcaaggaaatgaacgctgggtgagatgcaactttactgacgtcagtgaatgtcagtacacagttacaggactcagtcctggggatcgctatgagttcagaataattgcaagaaatgctgttggaactataagcccgccctcacagtcttctggcattattatgacaagagatgaaaatgttccaccaatagtagagtttggccctgaatactttgatggtctcattattaagtccggagagagccttagaattaaagctttggtacaaggaagaccagtgcctcgagtaacttggttcaaagatggagtggaaatcgaaaagaggatgaatatggaaataaccgacgtacttggatccaccagcctatttgttagagatgctactcgggaccatcgtggtgtatacacagtggaagccaaaaatgcatctggttctgcaaaagcagaaattaaagtgaaagtacaagatacaccaggaaaagtagttgggccaataagattcaccaatattactggggagaagatgactctgtggtgggatgccccactcaatgacggttgtgctcccataacccactacatcattgaaaaacgggaaaccagcagacttgcctgggcactaattgaggataaatgtgaagcccaaagttacactgccattaaactaataaacggcaatgaataccaattccgtgtttctgcagttaacaagtttggtgttggcaggccacttgattctgatccagtggttgctcaaatacaatatactgttcctgatgcccctggcattccagaacctagcaacataacaggcaacagcattaccctgacatgggcaaggccagaatcagatggtggcagtgaaattcaacagtatatccttgaaagaagagaaaagaaaagcacaagatgggtaaaagtgatcagcaaacgaccaatctctgaaacaagattcaaagtcactggtctgacagaaggcaatgagtatgaattccatgtcatggctgaaaatgctgcaggagttggacctgcaagtggcatctcaagactcattaaatgtagagagcccgtcaacccaccaggtcctcccacagtggtcaaagtaacagacacatcaaagacaactgtgagcttagaatggtccaaaccagtgtttgatggtggcatggaaataattgggtatattattgaaatgtgtaaggccgacttaggagactggcacaaggtgaatgcagaggcatgtgtgaaaacaagatatacagtcactgatctacaagcaggtgaagaatacaaattccgagttagtgctatcaatggtgctggaaaaggcgacagctgtgaagtgactggcacaattaaagcagttgaccggttaacagctcctgagttagacatagatgcaaacttcaaacagactcatgttgttagagctggggccagtattcgcctcttcattgcctaccaaggtagacctactcctacagctgtgtggagcaaaccagactctaaccttagccttcgggctgatatccatacaacagattccttcagcaccctcactgtggaaaactgcaacagaaatgatgcagggaaatatacccttactgtggaaaacaacagtggtagtaagtcaatcacattcaccgtgaaagtgctagacactccaggcccacctggcccaattaccttcaaagatgtgacccggggatctgctacattgatgtgggatgcccctcttcttgacggtggtgcccgaatccatcattatgtggtagagaaacgagaggcaagtcgccgtagttggcaggttatcagtgaaaaatgcactcgtcagatcttcaaggtcaatgacctggccgaaggtgttccgtactatttccgtgtttctgcagtaaatgagtatggtgttggtgagccctatgaaatgccagaaccaattgtagccacagaacagcctgctccacctaggagacttgatgttgttgatactagcaaatcctccgcagtcttagcttggcttaaacctgaccacgatggaggcagccggatcactggctacctgcttgaaatgagacaaaagggatctgacttctgggttgaagctggtcacaccaaacagctaactttcacagtagagcgtcttgttgagaaaactgaatatgaattccgtgtgaaggccaagaatgatgctggctatagtgaacccagagaagccttctcttctgtcatcattaaggagcctcaaatcgagcccactgctgacctcactggaattaccaatcagcttataacttgcaaagcaggaagcccatttaccattgacgtaccaatcagtggtcgtcctgcccccaaagtaacatggaaactggaagaaatgagacttaaagagacagatcgagtgagcattacaacaacaaaagacagaaccacactgactgtaaaggacagcatgagaggtgactctggaagatacttcttgaccctggaaaatacagctggtgttaaaacatttagcgtcacagttgtggtcattggaaggccaggtccagtaaccggccccattgaggtctcatctgtctcagctgaatcgtgtgtcctgtcatggggagaacctaaagatggaggaggcactgaaattactaattacatagttgaaaagcgtgaatcgggtacaacagcttggcagcttgtcaattccagtgtcaagcgcactcaaattaaagtcactcatctcacaaaatacatggaatattctttccgtgtcagttcagagaacagatttggtgtcagcaaacctctagaatcagcaccaataattgctgaacatccatttgtcccaccaagcgctcctaccagacctgaggtctaccatgtgtctgccaatgccatgtctattcgttgggaagaaccctaccacgatggtggcagtaaaatcattggctactgggttgagaagaaagaacgtaatacaattctttgggtgaaagaaaacaaagtgccatgcttagagtgcaactacaaagtaactggtttagtagaaggactggaatatcagttcagaacttatgcactcaatgctgcaggtgttagcaaggccagcgaagcttcaagacctataatggctcaaaatccagttgatgcaccaggcagaccagaggtgacagatgtcacaagatcaacagtatcactgatttggtctgccccagcgtatgatggaggcagcaaggttgtgggctacatcatagagcgtaagccagtcagtgaggtaggagatggtcgctggctgaagtgcaactacaccattgtatctgacaatttcttcaccgtgactgctctcagtgaaggagacacttatgagttccgtgtgttagccaagaatgcagcaggcgtaattagcaaagggtctgaatctacaggccctgtcacttgccgagatgaatacgctccacccaaagccgaactggatgcccgattacacggtgatctggttaccatcagagcaggttctgatcttgttctggatgctgcagttggtggcaaacctgaacccaaaattatctggaccaaaggagacaaggagctagatctctgtgaaaaagtctctttgcagtatactggcaaacgagcaactgctgtgatcaagttctgtgacagaagtgacagtggaaaatacactttaacagtgaaaaatgccagcgggaccaaggccgtgtctgtcatggtcaaagtgcttgattcccctggcccatgtggaaagctcaccgtcagcagagtaacacaggagaagtgcactttagcctggagccttccgcaggaagacggaggagcagaaatcactcactacatcgtggaaagacgcgagactagcaggctcaactgggtgattgttgaaggcgaatgcccaaccctatcctatgtcgttaccaggctcatcaagaacaatgagtacatattccgagtgagggcagtaaacaaatatggccctggtgtgcctgttgaatcagagccaattgtagccagaaactcattcactattccatcaccacccggcatacctgaagaagttgggactggcaaagagcatatcatcattcagtggacaaaacctgaatctgatggtggcaatgaaatcagcaactacctagtagacaaacgtgagaagaagagcctgcgctggacacgtgtcaacaaagactatgtggtgtatgataccaggctgaaggtgaccagcctgatggagggttgtgattaccagttccgggtgaccgcagtgaatgcagctggtaacagtgagcccagcgaagcttccaacttcatctcatgcagagaaccatcatatacccctggaccaccttctgctccaagagttgtggataccaccaaacacagcattagtttggcatggaccaaacccatgtacgatggtggtactgacattgtaggatatgttctggaaatgcaagagaaggacactgatcagtggtaccgagtgcataccaatgccacaataagaaatactgaattcactgtgccagaccttaaaatgggccagaaatattccttcagagttgctgccgtgaacgtgaagggtatgagcgaatacagcgaatcaattgctgaaattgagcccgtggaaagaatagaaataccagatcttgagcttgcagatgatctaaagaagactgtgaccatcagggctggggcctccttgcgcttgatggtgtctgtatctggaagaccacctcctgtcataacgtggagcaagcagggcattgaccttgcaagccgggcaattattgacaccactgagagctactcattgctaatagtggacaaagttaatcggtacgatgctggaaaatacacaattgaagctgaaaaccaatctggcaagaaatcagcaacagtccttgttaaagtctatgatactcctggtccctgtccttcagtgaaagttaaggaagtatcaagagattctgtgactataacttgggaaattcccacgattgatggtggagctccagtcaacaattacatcgttgagaagcgtgaagctgctatgagagcattcaaaacagtaactaccaaatgcagcaagacactttacagaatttctggacttgtagaaggaaccatgtactatttcagagtgctgccagaaaatatttatggcattggagaaccttgtgaaacatctgatgcagtactggtctcagaagtgcctttggtgcctgcaaagctagaagtggtcgatgtcaccaaatccactgttacccttgcctgggaaaaaccactctacgatggtggtagccgactcactggatatgttctcgaggcctgcaaagctggcacagagagatggatgaaggttgtcaccttaaaacccacagtcctagagcacactgttacttccttaaatgaaggtgaacaatacttatttagaataagggcacaaaatgagaaaggtgtgtcagaaccaagagagactgtcacagccgtgactgtacaagacctcagagtgttgccaacaatcgatctttctacaatgcctcagaagaccatccatgtcccagctggcagaccagtagagctggtgatacctattgctggccgtccacctcctgctgcttcctggttctttgctggttctaaactgagagaatcagagcgtgtcacagttgaaactcacactaaagtagctaaattaaccatccgtgaaaccactatcagagatactggagaatacacacttgaattgaagaatgttaccggaactacttcagaaaccattaaagttatcattcttgacaagcctggtccaccaacaggacctattaagattgatgaaattgatgctacatcaattaccatttcctgggaaccacctgaattggacggtggtgctccactgagtggttatgtggtagaacaacgtgacgctcatcgtccaggatggctgcccgtttctgaatcagtgactaggtccacgtttaagtttaccagactcaccgaaggaaatgagtatgtgttccgtgtggctgcaacaaaccgcttcgggattggctcttacttgcagtctgaggtcatagagtgtcgcagcagcatccgtattcctggacccccagaaacattacagatatttgatgtttcccgtgatggcatgacacttacttggtacccaccagaggatgacggtggctcccaagtgactggatatattgtggagcgcaaagaagtgagagcagatcgatgggtccgtgtaaataaagtacctgtgacaatgacacggtaccgctccactggccttactgaaggcttagaatatgaacaccgtgtcacagccattaatgcaagagggtctgggaaaccaagtcgtccttccaaacccatcgttgccatggatccaattgctcctccaggaaagccacaaaacccaagagttactgatacaacaaggacatcagtctccctggcctggagtgttccagaagatgaaggaggatctaaagtcacaggctacttgattgaaatgcaaaaagtagatcaacatgaatggaccaagtgtaacaccactccaaccaagattcgagagtatactctaacacacctacctcagggtgcagaatacaggttccgcgtcctagcttgtaatgctggtggacctggtgagcctgctgaggtaccaggaacagtcaaagtcactgaaatgcttgaatatcctgattatgaacttgatgaaagataccaagaaggtatctttgtaaggcaaggtggcgtcatcagacttaccataccaatcaaaggaaaaccattcccaatatgtaaatggaccaaggaaggccaggatattagtaagcgtgccatgattgcaacatctgaaacacacactgagcttgtgatcaaagaagcagacaggggtgattctggcacttatgacctggttctggaaaataaatgtggcaagaaggctgtctacatcaaggtcagggtgataggaagtcccaacagtccagaagggccactggaatatgatgacatccaagtccgctctgtgagggtcagctggagacctcctgctgatgatggtggtgctgacatcttaggctacatcctcgagagacgagaagtgcctaaagccgcctggtataccattgattccagagtccgaggtacatctctggtggtaaaaggcctcaaagagaatgtagaataccatttccgtgtttcagcagaaaaccagtttggcataagcaaacccttgaaatctgaggaaccagtcacaccaaaaacaccattgaatcctccagaacctccaagcaatcctccagaagtactcgatgtaaccaagagttctgttagcttgtcctggtcccggcccaaagatgatggtggttctagagtcacaggctactacatcgaacgcaaagagacatccactgacaagtgggtcagacacaacaagactcagatcaccaccacaatgtacactgtcacagggcttgttcccgatgctgagtatcagttccgcatcatcgcacagaatgatgttggcctgagtgagaccagccctgcttctgaaccagttgtttgcaaagatccatttgataaaccaagccaaccaggagaacttgagattctttcaatatccaaagatagtgtcactctacagtgggagaaacctgaatgtgatggtggtaaagaaattcttggatactgggttgaatatagacagtctggagacagtgcctggaagaagagcaataaggaacgtattaaggacaagcaattcacaataggaggtttgctggaagctactgagtatgaattcagggtttttgctgagaatgagactgggctgagcagacctcgcagaactgctatgtctataaagactaaactcacatctggagaggccccaggaatacgcaaagaaatgaaggatgttaccacaaaattgggtgaagctgctcaactctcatgccagattgttggaaggcctcttcctgacattaaatggtacagatttggtaaagagctcatacaaagccggaaatacaaaatgtcttcagatggacgcacacacactcttacagtaatgacagaggaacaggaagatgaaggtgtttatacctgcatagccaccaatgaggttggagaagtagaaaccagtagtaagcttctcctgcaagcaacaccgcagttccatcctggttacccactgaaagagaaatattatggagctgtgggttccacacttcggcttcatgttatgtacattggtcgtccagtacctgccatgacttggttccatggtcagaaacttttgcaaaactcagaaaacattactattgaaaacactgagcactatactcatcttgtcatgaagaatgtccaacgtaagactcatgctgggaaatacaaagtccagctcagcaatgtttttggaacagttgatgccatccttgatgtggaaatacaagataaaccagacaaacctacaggaccaattgtgatcgaagctctattgaagaactccgcagtgatcagctggaaaccacccgcagatgacggaggctcctggatcaccaactatgtggtggaaaaatgtgaggccaaggagggggctgaatggcaattggtgtcttcagccatctcagtgacaacctgtagaattgtgaacctcacagaaaatgctggctattacttccgggtttcagctcagaacactttcggcatcagtgaccctctagaagtgtcctcagttgtgatcattaagagtccatttgaaaagccaggtgctcctggcaaaccaactattactgctgtcacaaaagattcttgtgttgtggcctggaagccacctgccagtgatggaggtgcaaagattagaaattactaccttgagaagcgtgagaagaagcagaataaatggatttctgtgacaacagaagaaattcgagaaactgtcttttcagtgaaaaaccttattgaaggtcttgaatacgagtttcgtgtgaaatgtgaaaatctaggtggggaaagtgaatggagtgaaatatcagaacccatcactcccaaatctgatgtcccaattcaggcaccacactttaaagaggaactgagaaatctaaatgtcagatatcagagcaatgctaccttggtctgcaaagtgactggtcatccaaaacctatcgtcaaatggtacagacaaggcaaagaaatcattgcagatggattaaaatataggattcaagaatttaagggtggctaccaccagctcatcattgcaagtgtcacagatgatgatgccacagtttaccaagtcagagctaccaaccaagggggatctgtgtctggcactgcctccttggaagtggaagttccagctaagatacacttacctaaaactcttgaaggcatgggagcagttcatgctctccgaggtgaagtggtcagcatcaagattcctttcagtggcaaaccagatcctgtgatcacctggcagaaaggacaagatctcattgacaataatggccactaccaagttattgtcacaagatccttcacatcacttgttttccccaatggggtagagagaaaagatgctggtttctatgtggtctgtgctaaaaacagatttggaattgatcagaagacagttgaactggatgtggctgatgttcctgacccacccagaggagtcaaagttagtgatgtctcacgagattctgtcaacttaacatggactgagccagcctctgatggtggcagcaaaatcaccaactacattgttgaaaaatgtgcaactactgcagaaagatggctccgtgtaggacaggcccgagaaacacgttataccgtgatcaacttatttggaaaaacaagttaccagttccgggtaatagctgaaaataaatttggtctgagcaagccttcagagccttcagaaccaaccataaccaaagaagataagaccagagctatgaactatgatgaagaggtagatgaaaccagggaagtctccatgactaaagcatctcactcttcaaccaaggaactctatgagaaatatatgattgctgaagatcttgggcgtggtgagtttggaattgtccatcgttgtgttgaaacatcctcaaagaagacatacatggccaaatttgttaaagtcaaagggactgatcaggttttggtaaagaaggaaatttccattctgaatattgctaggcatagaaacatcttacacctccatgaatcatttgaaagcatggaagaattagttatgatctttgagtttatatcaggacttgacatatttgagcgcattaacacaagtgcttttgaacttaatgaaagagaaattgtaagttatgttcaccaggtctgtgaagcacttcagtttttacacagtcataatattggacactttgacattagaccagaaaatatcatttaccaaaccagaagaagctctaccattaaaatcatagaatttggtcaagcccgtcagctgaaaccaggggacaacttcaggcttctattcactgccccagaatactatgcacctgaagtccaccagcatgatgttgtcagcacagccacagacatgtggtcacttggaacactggtatatgtgctattgagtggtatcaacccattcctggctgaaactaaccaacagatcattgagaatatcatgaatgctgaatatactttcgatgaggaagcattcaaagagattagcattgaagccatggattttgttgaccggttgttagtgaaagagaggaaatctcgcatgacagcatcggaggctctccagcacccatggttgaagcagaagatagaaagagtcagtactaaagttatcagaacattaaaacaccggcgttattaccacaccctgatcaagaaagacctcaacatggttgtgtcagcagcccggatctcctgtggtggtgcaattcgatctcagaagggagtgagtgttgctaaagttaaagtggcatccattgaaattggcccagtttctgggcagataatgcatgcagttggtgaagaaggaggacatgtcaaatatgtatgcaaaattgaaaattatgatcagtctacccaagtgacttggtactttggcgtccgacagctggagaacagtgagaaatacgaaatcacctacgaagatggagtggccatcctctatgtcaaagacattaccaaattagatgatggtacctacagatgcaaagtagtcaatgactatggtgaagacagttcttatgcagagctatttgttaaaggtgtgagagaagtctatgactattactgccgtagaaccatgaagaaaattaagcgcagaacagacacaatgagactcctggaaaggccaccagaatttaccctgcctctctataataagacagcttatgtaggtgaaaatgtccggtttggagtaactataactgtccacccagagcctcatgtaacatggtataaatcaggtcagaaaatcaaaccaggtgacaatgacaagaagtacacatttgagtcagacaagggtctttaccaattaacaatcaacagtgtcactacagatgatgacgctgaatatactgttgtggcaaggaacaaatatggtgaagacagctgtaaagcaaagctgacagtaaccctacacccacctccaacagatagtaccttaagacccatgttcaaaaggttactggcaaatgcagaatgccaagaaggccaaagtgtctgctttgagatcagagtgtctggcatccccccaccaacattaaaatgggagaaagatggtcagccactgtccctcgggcctaacattgaaattatccatgaaggcttggattattatgctctgcacatcagggacactttgcctgaagacacgggttattatagagtcacagccactaacacagctgggtccaccagctgccaggctcacctacaagtggaacgcctgaggtacaagaaacaggaattcaagagtaaggaggagcatgagcgacacgtacaaaaacaaattgacaaaaccctcagaatggctgaaattctttctggaactgaaagtgtaccactgacacaggtagctaaagaggctctgagagaagctgctgtcctttataaaccggctgtaagcaccaagactgtaaaaggggaattcagacttgagatagaagaaaagaaggaggagagaaaactccggatgccttatgatgtaccagagccacgcaagtataagcagactaccatagaagaagaccaacgcatcaagcagttcgtgcccatgtctgacatgaagtggtataaaaagatacgtgatcagtatgaaatgcctgggaaacttgacagagttgtacagaaacgacccaagcgcatccgcctttcaagatgggaacagttctatgtgatgcctcttccacgcattacagatcaatacagacctaaatggcgtattcctaaactgtcccaagatgatcttgagatagtgagaccagcccgccggcgtacaccttctcctgattatgacttttactaccgacctagaagacgttctcttggggacatctctgatgaagaattactcctccccattgatgactacttagcaatgaaaagaacagaggaagagaggctgcgtcttgaagaagagcttgagttaggtttttcagcttcacccccaagtcgaagccctccacactttgagctttctagcctacgttactcttcaccacaagctcatgtcaaggtggaggaaacaagaaaagacttcaggtattcaacctatcacatcccaacgaaggctgaagctagtacaagttatgcagaactgagggaacggcatgcccaggctgcgtacagacagccaaagcaacggcaaagaatcatggctgagagggaggatgaagagttgcttcgcccagttacgaccacccagcatctctcagaatacaaaagcgaacttgacttcatgtcaaaggaggaaaagtctagaaagaaatcaaggcgacaaagagaagtgacagaaataacagaaattgaggaagaatacgaaatctcaaaacatgctcaaagagaatcatcctcatctgcgtctagactactgagacgacggcgctccctgtctccaacttatattgagttaatgaggccagtgtctgagctgatccggtcacgtccacaaccggctgaggaatacgaagatgacacagaaagaaggtcacctactccagagagaactcgcccacgatcccccagccctgtgtctagtgagagatcactctcgagatttgagaggtctgcaagatttgatatcttttccaggtatgagtccatgaaagctgctttaaaaactcagaagacatcagaaaggaagtatgaagttttgagtcagcagcctttcacactggaccatgcccctcgaatcacactgagaatgcgctcgcacagggtaccatgtggccaaaatacacgttttattttaaatgttcagtctaagccaactgccgaggttaaatggtaccacaatggtgtggaactccaagaaagcagtaagattcattacaccaacacgagtggagtcctcaccctggaaattctggactgtcatactgatgacagtggaacctaccgtgctgtgtgcaccaactacaagggcgaagcttctgactatgcaacgttggacgtgacaggaggggattataccacctatgcttcccaacgcagagatgaagaggtccccagatctgttttccctgagctgacaagaacagaggcgtatgctgtttcatcatttaagaaaacatctgagatggaagcttcgtcttctgtcagggaagtgaaatcacagatgacggagacaagggaaagtctctcctcatatgaacactctgcatctgcagaaatgaaaagtgctgcattagaagaaaagtcactggaagaaaaatccacaaccagaaagatcaagacgactttggcagcaagaattctaacaaagccacggtccatgaccgtctacgagggcgagtctgcaaggttttcttgtgacaccgatggtgagccggtaccaactgtgacctggctgcgtaaaggacaagtgctaagtacttctgcccgccaccaagtgaccaccacaaagtacaaatcaacctttgagatctcttcagtccaggcttccgatgagggcaattacagcgtggtggtagaaaacagtgaagggaaacaagaagcagagttcactctgactattcaaaaggccagggtaactgaaaaggctgtgacatcaccaccaagagtcaaatccccagagcctcgggtgaaatccccagaagcagttaagtctccaaaacgagtgaaatctccagaaccttctcacccgaaagccgtatcacccacagagacaaaaccaacaccaacagagaaagttcagcacctcccagtctctgccccaccaaagattactcagttcctgaaagcagaagcttctaaagagattgcaaaactgacctgtgtggttgaaagcagtgtattaagggcaaaagaggtcacctggtataaagatggcaagaaactgaaggaaaatgggcatttccagtttcattattcagcagatggtacctatgagctcaaaatcaataacctcactgaatctgatcaaggagaatatgtttgtgagatttctggtgaaggtggaacgtctaaaaccaacttacaatttatggggcaagcctttaagagtatccatgagaaggtatcaaaaatatcagaaactaagaaatcagatcagaaaaccactgagtcaacagtaaccagaaaaactgaaccaaaagctcctgaaccaatttcctcaaaaccagtaattgttactgggttgcaggatacaactgtttcttcagacagtgttgctaaatttgcagttaaggctactggagaaccccggccaactgccatctggacaaaagatggaaaggccattacacaaggaggtaaatataaactctctgaagacaagggagggttcttcttagaaattcataagactgatacttctgacagtggactttatacttgtacagtaaaaaattcagctggatctgtgtcctctagctgcaaattaacaataaaagctataaaagatactgaggcacagaaagtctctacacaaaagacttctgaaattacacctcagaagaaagctgttgtccaagaggaaatttcccaaaaagccctaaggtctgaagaaattaagatgtcagaggcaaaatctcaagaaaagttagccctcaaagaggaagcttcaaaggttctgatttctgaagaagtcaagaaatcagcagcaacctccctggaaaaatccattgtccatgaggaaatcactaaaacatcacaggcatcagaagaagtcagaactcatgctgagattaaagcattttctactcagatgagcataaacgaaggtcaaagactggttttaaaagccaacattgctggtgccactgatgtgaaatgggtactgaatggcgtagagcttaccaactctgaggagtaccgatatggtgtctcaggcagcgatcagaccctaaccatcaagcaagccagtcacagagatgaaggaatcctcacctgcataagcaaaaccaaggaaggaatcgtcaagtgtcagtatgatttgacactgagcaaagaactctcagatgctccagccttcatctcacagcctagatctcaaaatattaatgaaggacaaaatgttctctttacttgtgaaatcagtggcgagccatcccctgaaatcgaatggtttaaaaacaacctgccaatttctatttcttcaaatgtcagcataagccgctccagaaatgtatactcccttgaaatccgaaatgcatcagtcagcgacagtggaaagtacacaattaaggccaaaaatttccgtggccagtgttcagctacagcttccttaatggtccttcctctagttgaagaaccttccagagaggtagtattgagaacaagtggtgacacaagcttgcaaggaagcttctcgtctcagtcagtccaaatgtctgcctccaagcaggaggcctccttcagcagtttcagcagcagcagtgctagcagcatgactgagatgaaatttgcaagcatgtctgcccaaagcatgtcctccatgcaagagtcctttgtagaaatgagttccagcagctttatgggaatatctaatatgacacaactggaaagctcaactagtaaaatgcttaaagcaggcataagaggaattccgcctaaaattgaagctcttccatctgatatcagcattgatgaaggcaaagttctaacagtagcctgtgctttcacgggtgagcctaccccagaagtaacatggtcctgtggtggaagaaaaatccacagtcaagaacaggggaggttccacattgaaaacacagatgacctgacaaccctgatcatcatggacgtacagaaacaagatggtggactttataccctgagtttagggaatgaatttggatctgactctgccactgtgaatatacatattcgatccatttaa

SEQ ID NO: 394 - protein, 34350 aa, Homo sapiens
  Q8WZ42
MTTQAPTFTQPLQSVVVLEGSTATFEAHISGFPVPEVSWFRDGQVISTSTLPGVQISFSDGRAKLTIPAVTKANSGRYSLKATNGSGQATSTAELLVKAETAPPNFVQRLQSMTVRQGSQVRLQVRVTGIPTPVVKFYRDGAEIQSSLDFQISQEGDLYSLLIAEAYPEDSGTYSVNATNSVGRATSTAELLVQGEEEVPAKKTKTIVSTAQISESRQTRIEKKIEAHFDARSIATVEMVIDGAAGQQLPHKTPHRIPPKPKSRSPTPPSIAAKAQLARQQSPSPIRHSPSPVRHVRAPTPSPVRSVSPAARISTSPIRSVRSPLLMRKTQASTVATGPEVPPPWKQEGYVASSSEAEMRETTLTTSTQIRTEERWEGRYGVQEQVTISGAAGAAASVSASASYAAEAVATGAKEVKQDADKSAAVATVVAAVDMARVREPVISAVEQTAQRTTTTAVHIQPAQEQVRKEAEKTAVTKVVVAADKAKEQELKSRTKEVITTKQEQMHVTHEQIRKETEKTFVPKVVISAAKAKEQETRISEEITKKQKQVTQEAIRQETEITAASMVVVATAKSTKLETVPGAQEETTTQQDQMHLSYEKIMKETRKTVVPKVIVATPKVKEQDLVSRGREGITTKREQVQITQEKMRKEAEKTALSTIAVATAKAKEQETILRTRETMATRQEQIQVTHGKVDVGKKAEAVATVVAAVDQARVREPREPGHLEESYAQQTTLEYGYKERISAAKVAEPPQRPASEPHVVPKAVKPRVIQAPSETHIKTTDQKGMHISSQIKKTTDLTTERLVHVDKRPRTASPHFTVSKISVPKTEHGYEASIAGSAIATLQKELSATSSAQKITKSVKAPTVKPSETRVRAEPTPLPQFPFADTPDTYKSEAGVEVKKEVGVSITGTTVREERFEVLHGREAKVTETARVPAPVEIPVTPPTLVSGLKNVTVIEGESVTLECHISGYPSPTVTWYREDYQIESSIDFQITFQSGIARLMIREAFAEDSGRFTCSAVNEAGTVSTSCYLAVQVSEEFEKETTAVTEKFTTEEKRFVESRDVVMTDTSLTEEQAGPGEPAAPYFITKPVVQKLVEGGSVVFGCQVGGNPKPHVYWKKSGVPLTTGYRYKVSYNKQTGECKLVISMTFADDAGEYTIVVRNKHGETSASASLLEEADYELLMKSQQEMLYQTQVTAFVQEPKVGETAPGFVYSEYEKEYEKEQALIRKKMAKDTVVVRTYVEDQEFHISSFEERLIKEIEYRIIKTTLEELLEEDGEEKMAVDISESEAVESGFDLRIKNYRILEGMGVTFHCKMSGYPLPKIAWYKDGKRIKHGERYQMDFLQDGRASLRIPVVLPEDEGIYTAFASNIKGNAICSGKLYVEPAAPLGAPTYIPTLEPVSRIRSLSPRSVSRSPIRMSPARMSPARMSPARMSPARMSPGRRLEETDESQLERLYKPVFVLKPVSFKCLEGQTARFDLKVVGRPMPETFWFHDGQQIVNDYTHKVVIKEDGTQSLIIVPATPSDSGEWTVVAQNRAGRSSISVILTVEAVEHQVKPMFVEKLKNVNIKEGSQLEMKVRATGNPNPDIVWLKNSDIIVPHKYPKIRIEGTKGEAALKIDSTVSQDSAWYTATAINKAGRDTTRCKVNVEVEFAEPEPERKLIIPRGTYRAKEIAAPELEPLHLRYGQEQWEEGDLYDKEKQQKPFFKKKLTSLRLKRFGPAHFECRLTPIGDPTMVVEWLHDGKPLEAANRLRMINEFGYCSLDYGVAYSRDSGIITCRATNKYGTDHTSATLIVKDEKSLVEESQLPEGRKGLQRIEELERMAHEGALTGVTTDQKEKQKPDIVLYPEPVRVLEGETARFRCRVTGYPQPKVNWYLNGQLIRKSKRFRVRYDGIHYLDIVDCKSYDTGEVKVTAENPEGVIEHKVKLEIQQREDFRSVLRRAPEPRPEFHVHEPGKLQFEVQKVDRPVDTTETKEVVKLKRAERITHEKVPEESEELRSKFKRRTEEGYYEAITAVELKSRKKDESYEELLRKTKDELLHWTKELTEEEKKALAEEGKITIPTFKPDKIELSPSMEAPKIFERIQSQTVGQGSDAHFRVRVVGKPDPECEWYKNGVKIERSDRIYWYWPEDNVCELVIRDVTAEDSASIMVKAINIAGETSSHAFLLVQAKQLITFTQELQDVVAKEKDTMATFECETSEPFVKVKWYKDGMEVHEGDKYRMHSDRKVHFLSILTIDTSDAEDYSCVLVEDENVKTTAKLIVEGAVVEFVKELQDIEVPESYSGELECIVSPENIEGKWYHNDVELKSNGKYTITSRRGRQNLTVKDVTKEDQGEYSFVIDGKKTTCKLKMKPRPIAILQGLSDQKVCEGDIVQLEVKVSLESVEGVWMKDGQEVQPSDRVHIVIDKQSHMLLIEDMTKEDAGNYSFTIPALGLSTSGRVSVYSVDVITPLKDVNVIEGTKAVLECKVSVPDVTSVKWYLNDEQIKPDDRVQAIVKGTKQRLVINRTHASDEGPYKLIVGRVETNCNLSVEKIKIIRGLRDLTCTETQNVVFEVELSHSGIDVLWNFKDKEIKPSSKYKIEAHGKIYKLTVLNMMKDDEGKYTFYAGENITSGKLTVAGGAISKPLTDQTVAESQEAVFECEVANPDSKGEWLRDGKHLPLTNNIRSESDGHKRRLIIAATKLDDIGEYTYKVATSKTSAKLKVEAVKIKKTLKNLTVTETQDAVFTVELTHPNVKGVQWIKNGVVLESNEKYAISVKGTIYSLRIKNCAIVDESVYGFRLGRLGASARLHVETVKIIKKPKDVTALENATVAFEVSVSHDTVPVKWFHKNVEIKPSDKHRLVSERKVHKLMLQNISPSDAGEYTAVVGQLECKAKLFVETLHITKTMKNIEVPETKTASFECEVSHFNVPSMWLKNGVEIEMSEKFKIVVQGKLHQLIIMNTSTEDSAEYTFVCGNDQVSATLTVTPIMITSMLKDINAEEKDTITFEVTVNYEGISYKWLKNGVEIKSTDKCQMRTKKLTHSLNIRNVHFGDAADYTFVAGKATSTATLYVEARHIEFRKHIKDIKVLEKKRAMFECEVSEPDITVQWMKDDQELQITDRIKIQKEKYVHRLLIPSTRMSDAGKYTVVAGGNVSTAKLFVEGRDVRIRSIKKEVQVIEKQRAVVEFEVNEDDVDAHWYKDGIEINFQVQERHKYVVERRIHRMFISETRQSDAGEYTFVAGRNRSSVTLYVNAPEPPQVLQELQPVTVQSGKPARFCAVISGRPQPKISWYKEEQLLSTGFKCKFLHDGQEYTLLLIEAFPEDAAVYTCEAKNDYGVATTSASLSVEVPEVVSPDQEMPVYPPAIITPLQDTVTSEGQPARFQCRVSGTDLKVSWYSKDKKIKPSRFFRMTQFEDTYQLEIAEAYPEDEGTYTFVASNAVGQVSSTANLSLEAPESILHERIEQEIEMEMKEFSSSFLSAEEEGLHSAELQLSKINETLELLSESPVYSTKFDSEKEGTGPIFIKEVSNADISMGDVATLSVTVIGIPKPKIQWFFNGVLLTPSADYKFVFDGDDHSLIILFTKLEDEGEYTCMASNDYGKTICSAYLKINSKGEGHKDTETESAVAKSLEKLGGPCPPHFLKELKPIRCAQGLPAIFEYTVVGEPAPTVTWFKENKQLCTSVYYTIIHNPNGSGTFIVNDPQREDSGLYICKAENMLGESTCAAELLVLLEDTDMTDTPCKAKSTPEAPEDFPQTPLKGPAVEALDSEQEIATFVKDTILKAALITEENQQLSYEHIAKANELSSQLPLGAQELQSILEQDKLTPESTREFLCINGSIHFQPLKEPSPNLQLQIVQSQKTFSKEGILMPEEPETQAVLSDTEKIFPSAMSIEQINSLTVEPLKTLLAEPEGNYPQSSIEPPMHSYLTSVAEEVLSPKEKTVSDTNREQRVTLQKQEAQSALILSQSLAEGHVESLQSPDVMISQVNYEPLVPSEHSCTEGGKILIESANPLENAGQDSAVRIEEGKSLRFPLALEEKQVLLKEEHSDNVVMPPDQIIESKREPVAIKKVQEVQGRDLLSKESLLSGIPEEQRLNLKIQICRALQAAVASEQPGLFSEWLRNIEKVEVEAVNITQEPRHIMCMYLVTSAKSVTEEVTIIIEDVDPQMANLKMELRDALCAIIYEEIDILTAEGPRIQQGAKTSLQEEMDSFSGSQKVEPITEPEVESKYLISPEEVSYFNVQSRVKYLDATPVTKGVASAVVSDEKQDESLKPSEEKEESSSESGTEEVATVKIQEAEGGFIKEDGPMIHTPLVDTVSEEGDIVHLTTSITNAKEVNWYFENKLVPSDEKFKCLQDQNTYTLVIDKVNTEDHQGEYVCEALNDSGKTATSAKLTVVKRAAPVIKRKIEPLEVALGHLAKFTCEIQSAPNVRFQWFKAGREIYESDKCSIRSSKYISSLEILRTQVVDCGEYTCKASNEYGSVSCTATLTVTEAYPPTFLSRPKSLTTFVGKAAKFICTVTGTPVIETIWQKDGAALSPSPNWKISDAENKHILELSNLTIQDRGVYSCKASNKFGADICQAELIIIDKPHFIKELEPVQSAINKKVHLECQVDEDRKVTVTWSKDGQKLPPGKDYKICFEDKIATLEIPLAKLKDSGTYVCTASNEAGSSSCSATVTVREPPSFVKKVDPSYLMLPGESARLHCKLKGSPVIQVTWFKNNKELSESNTVRMYFVNSEAILDITDVKVEDSGSYSCEAVNDVGSDSCSTEIVIKEPPSFIKTLEPADIVRGTNALLQCEVSGTGPFEISWFKDKKQIRSSKKYRLFSQKSLVCLEIFSFNSADVGEYECVVANEVGKCGCMATHLLKEPPTFVKKVDDLIALGGQTVTLQAAVRGSEPISVTWMKGQEVIREDGKIKMSFSNGVAVLIIPDVQISFGGKYTCLAENEAGSQTSVGELIVKEPAKIIERAELIQVTAGDPATLEYTVAGTPELKPKWYKDGRPLVASKKYRISFKNNVAQLKFYSAELHDSGQYTFEISNEVGSSSCETTFTVLDRDIAPFFTKPLRNVDSVVNGTCRLDCKIAGSLPMRVSWFKDGKEIAASDRYRIAFVEGTASLEIIRVDMNDAGNFTCRATNSVGSKDSSGALIVQEPPSFVTKPGSKDVLPGSAVCLKSTFQGSTPLTIRWFKGNKELVSGGSCYITKEALESSLELYLVKTSDSGTYTCKVSNVAGGVECSANLFVKEPATFVEKLEPSQLLKKGDATQLACKVTGTPPIKITWFANDREIKESSKHRMSFVESTAVLRLTDVGIEDSGEYMCEAQNEAGSDHCSSIVIVKESPYFTKEFKPIEVLKEYDVMLLAEVAGTPPFEITWFKDNTILRSGRKYKTFIQDHLVSLQILKFVAADAGEYQCRVTNEVGSSICSARVTLREPPSFIKKIESTSSLRGGTAAFQATLKGSLPITVTWLKDSDEITEDDNIRMTFENNVASLYLSGIEVKHDGKYVCQAKNDAGIQRCSALLSVKEPATITEEAVSIDVTQGDPATLQVKFSGTKEITAKWFKDGQELTLGSKYKISVTDTVSILKIISTEKKDSGEYTFEVQNDVGRSSCKARINVLDLIIPPSFTKKLKKMDSIKGSFIDLECIVAGSHPISIQWFKDDQEISASEKYKFSFHDNTAFLEISQLEGTDSGTYTCSATNKAGHNQCSGHLTVKEPPYFVEKPQSQDVNPNTRVQLKALVGGTAPMTIKWFKDNKELHSGAARSVWKDDTSTSLELFAAKATDSGTYICQLSNDVGTATSKATLFVKEPPQFIKKPSPVLVLRNGQSTTFECQITGTPKIRVSWYLDGNEITAIQKHGISFIDGLATFQISGARVENSGTYVCEARNDAGTASCSIELKVKEPPTFIRELKPVEVVKYSDVELECEVTGTPPFEVTWLKNNREIRSSKKYTLTDRVSVFNLHITKCDPSDTGEYQCIVSNEGGSCSCSTRVALKEPPSFIKKIENTTTVLKSSATFQSTVAGSPPISITWLKDDQILDEDDNVYISFVDSVATLQIRSVDNGHSGRYTCQAKNESGVERCYAFLLVQEPAQIVEKAKSVDVTEKDPMTLECVVAGTPELKVKWLKDGKQIVPSRYFSMSFENNVASFRIQSVMKQDSGQYTFKVENDFGSSSCDAYLRVLDQNIPPSFTKKLTKMDKVLGSSIHMECKVSGSLPISAQWFKDGKEISTSAKYRLVCHERSVSLEVNNLELEDTANYTCKVSNVAGDDACSGILTVKEPPSFLVKPGRQQAIPDSTVEFKAILKGTPPFKIKWFKDDVELVSGPKCFIGLEGSTSFLNLYSVDASKTGQYTCHVTNDVGSDSCTTMLLVTEPPKFVKKLEASKIVKAGDSSRLECKIAGSPEIRVVWFRNEHELPASDKYRMTFIDSVAVIQMNNLSTEDSGDFICEAQNPAGSTSCSTKVIVKEPPVFSSFPPIVETLKNAEVSLECELSGTPPFEVVWYKDKRQLRSSKKYKIASKNFHTSIHILNVDTSDIGEYHCKAQNEVGSDTCVCTVKLKEPPRFVSKLNSLTVVAGEPAELQASIEGAQPIFVQWLKEKEEVIRESENIRITFVENVATLQFAKAEPANAGKYICQIKNDGGMEENMATLMVLEPAVIVEKAGPMTVTVGETCTLECKVAGTPELSVEWYKDGKLLTSSQKHKFSFYNKISSLRILSVERQDAGTYTFQVQNNVGKSSCTAVVDVSDRAVPPSFTRRLKNTGGVLGASCILECKVAGSSPISVAWFHEKTKIVSGAKYQTTFSDNVCTLQLNSLDSSDMGNYTCVAANVAGSDECRAVLTVQEPPSFVKEPEPLEVLPGKNVTFTSVIRGTPPFKVNWFRGARELVKGDRCNIYFEDTVAELELFNIDISQSGEYTCVVSNNAGQASCTTRLFVKEPAAFLKRLSDHSVEPGKSIILESTYTGTLPISVTWKKDGFNITTSEKCNIVTTEKTCILEILNSTKRDAGQYSCEIENEAGRDVCGALVSTLEPPYFVTELEPLEAAVGDSVSLQCQVAGTPEITVSWYKGDTKLRPTPEYRTYFTNNVATLVFNKVNINDSGEYTCKAENSIGTASSKTVFRIQERQLPPSFARQLKDIEQTVGLPVTLTCRLNGSAPIQVCWYRDGVLLRDDENLQTSFVDNVATLKILQTDLSHSGQYSCSASNPLGTASSSARLTAREPKKSPFFDIKPVSIDVIAGESADFECHVTGAQPMRITWSKDNKEIRPGGNYTITCVGNTPHLRILKVGKGDSGQYTCQATNDVGKDMCSAQLSVKEPPKFVKKLEASKVAKQGESIQLECKISGSPEIKVSWFRNDSELHESWKYNMSFINSVALLTINEASAEDSGDYICEAHNGVGDASCSTALTVKAPPVFTQKPSPVGALKGSDVILQCEISGTPPFEVVWVKDRKQVRNSKKFKITSKHFDTSLHILNLEASDVGEYHCKATNEVGSDTCSCSVKFKEPPRFVKKLSDTSTLIGDAVELRAIVEGFQPISVVWLKDRGEVIRESENTRISFIDNIATLQLGSPEASNSGKYICQIKNDAGMRECSAVLTVLEPARIIEKPEPMTVTTGNPFALECVVTGTPELSAKWFKDGRELSADSKHHITFINKVASLKIPCAEMSDKGLYSFEVKNSVGKSNCTVSVHVSDRIVPPSFIRKLKDVNAILGASVVLECRVSGSAPISVGWFQDGNEIVSGPKCQSSFSENVCTLNLSLLEPSDTGIYTCVAANVAGSDECSAVLTVQEPPSFEQTPDSVEVLPGMSLTFTSVIRGTPPFKVKWFKGSRELVPGESCNISLEDFVTELELFEVQPLESGDYSCLVTNDAGSASCTTHLFVKEPATFVKRLADFSVETGSPIVLEATYTGTPPISVSWIKDEYLISQSERCSITMTEKSTILEILESTIEDYAQYSCLIENEAGQDICEALVSVLEPPYFIEPLEHVEAVIGEPATLQCKVDGTPEIRISWYKEHTKLRSAPAYKMQFKNNVASLVINKVDHSDVGEYSCKADNSVGAVASSAVLVIKERKLPPFFARKLKDVHETLGFPVAFECRINGSEPLQVSWYKDGVLLKDDANLQTSFVHNVATLQILQTDQSHIGQYNCSASNPLGTASSSAKLILSEHEVPPFFDLKPVSVDLALGESGTFKCHVTGTAPIKITWAKDNREIRPGGNYKMTLVENTATLTVLKVGKGDAGQYTCYASNIAGKDSCSAHLGVQEPPRFIKKLEPSRIVKQDEFTRYECKIGGSPEIKVLWYKDETEIQESSKFRMSFVDSVAVLEMHNLSVEDSGDYTCEAHNAAGSASSSTSLKVKEPPIFRKKPHPIETLKGADVHLECELQGTPPFHVSWYKDKRELRSGKKYKIMSENFLTSIHILNVDAADIGEYQCKATNDVGSDTCVGSIALKAPPRFVKKLSDISTVVGKEVQLQTTIEGAEPISVVWFKDKGEIVRESDNIWISYSENIATLQFSRVEPANAGKYTCQIKNDAGMQECFATLSVLEPATIVEKPESIKVTTGDTCTLECTVAGTPELSTKWFKDGKELTSDNKYKISFFNKVSGLKIINVAPSDSGVYSFEVQNPVGKDSCTASLQVSDRTVPPSFTRKLKETNGLSGSSVVMECKVYGSPPISVSWFHEGNEISSGRKYQTTLTDNTCALTVNMLEESDSGDYTCIATNMAGSDECSAPLTVREPPSFVQKPDPMDVLTGTNVTFTSIVKGTPPFSVSWFKGSSELVPGDRCNVSLEDSVAELELFDVDTSQSGEYTCIVSNEAGKASCTTHLYIKAPAKFVKRLNDYSIEKGKPLILEGTFTGTPPISVTWKKNGINVTPSQRCNITTTEKSAILEIPSSTVEDAGQYNCYIENASGKDSCSAQILILEPPYFVKQLEPVKVSVGDSASLQCQLAGTPEIGVSWYKGDTKLRPTTTYKMHFRNNVATLVFNQVDINDSGEYICKAENSVGEVSASTFLTVQEQKLPPSFSRQLRDVQETVGLPVVFDCAISGSEPISVSWYKDGKPLKDSPNVQTSFLDNTATLNIFKTDRSLAGQYSCTATNPIGSASSSARLILTEGKNPPFFDIRLAPVDAVVGESADFECHVTGTQPIKVSWAKDSREIRSGGKYQISYLENSAHLTVLKVDKGDSGQYTCYAVNEVGKDSCTAQLNIKERLIPPSFTKRLSETVEETEGNSFKLEGRVAGSQPITVAWYKNNIEIQPTSNCEITFKNNTLVLQVRKAGMNDAGLYTCKVSNDAGSALCTSSIVIKEPKKPPVFDQHLTPVTVSEGEYVQLSCHVQGSEPIRIQWLKAGREIKPSDRCSFSFASGTAVLELRDVAKADSGDYVCKASNVAGSDTTKSKVTIKDKPAVAPATKKAAVDGRLFFVSEPQSIRVVEKTTATFIAKVGGDPIPNVKWTKGKWRQLNQGGRVFIHQKGDEAKLEIRDTTKTDSGLYRCVAFNEHGEIESNVNLQVDERKKQEKIEGDLRAMLKKTPILKKGAGEEEEIDIMELLKNVDPKEYEKYARMYGITDFRGLLQAFELLKQSQEEETHRLEIEEIERSERDEKEFEELVSFIQQRLSQTEPVTLIKDIENQTVLKDNDAVFEIDIKINYPEIKLSWYKGTEKLEPSDKFEISIDGDRHTLRVKNCQLKDQGNYRLVCGPHIASAKLTVIEPAWERHLQDVTLKEGQTCTMTCQFSVPNVKSEWFRNGRILKPQGRHKTEVEHKVHKLTIADVRAEDQGQYTCKYEDLETSAELRIEAEPIQFTKRIQNIVVSEHQSATFECEVSFDDAIVTWYKGPTELTESQKYNFRNDGRCHYMTIHNVTPDDEGVYSVIARLEPRGEARSTAELYLTTKEIKLELKPPDIPDSRVPIPTMPIRAVPPEEIPPVVAPPIPLLLPTPEEKKPPPKRIEVTKKAVKKDAKKVVAKPKEMTPREEIVKKPPPPTTLIPAKAPEIIDVSSKAEEVKIMTITRKKEVQKEKEAVYEKKQAVHKEKRVFIESFEEPYDELEVEPYTEPFEQPYYEEPDEDYEEIKVEAKKEVHEEWEEDFEEGQEYYEREEGYDEGEEEWEEAYQEREVIQVQKEVYEESHERKVPAKVPEKKAPPPPKVIKKPVIEKIEKTSRRMEEEKVQVTKVPEVSKKIVPQKPSRTPVQEEVIEVKVPAVHTKKMVISEEKMFFASHTEEEVSVTVPEVQKEIVTEEKIHVAVSKRVEPPPKVPELPEKPAPEEVAPVPIPKKVEPPAPKVPEVPKKPVPEEKKPVPVPKKEPAAPPKVPEVPKKPVPEEKIPVPVAKKKEAPPAKVPEVQKRVVTEEKITIVTQREESPPPAVPEIPKKKVPEERKPVPRKEEEVPPPPKVPALPKKPVPEEKVAVPVPVAKKAPPPRAEVSKKTVVEEKRFVAEEKLSFAVPQRVEVTRHEVSAEEEWSYSEEEEGVSISVYREEEREEEEEAEVTEYEVMEEPEEYVVEEKLHIISKRVEAEPAEVTERQEKKIVLKPKIPAKIEEPPPAKVPEAPKKIVPEKKVPAPVPKKEKVPPPKVPEEPKKPVPEKKVPPKVIKMEEPLPAKVTERHMQITQEEKVLVAVTKKEAPPKARVPEEPKRAVPEEKVLKLKPKREEEPPAKVTEFRKRVVKEEKVSIEAPKREPQPIKEVTIMEEKERAYTLEEEAVSVQREEEYEEYEEYDYKEFEEYEPTEEYDQYEEYEEREYERYEEHEEYITEPEKPIPVKPVPEEPVPTKPKAPPAKVLKKAVPEEKVPVPIPKKLKPPPPKVPEEPKKVFEEKIRISITKREKEQVTEPAAKVPMKPKRVVAEEKVPVPRKEVAPPVRVPEVPKELEPEEVAFEEEVVTHVEEYLVEEEEEYIHEEEEFITEEEVVPVIPVKVPEVPRKPVPEEKKPVPVPKKKEAPPAKVPEVPKKPEEKVPVLIPKKEKPPPAKVPEVPKKPVPEEKVPVPVPKKVEAPPAKVPEVPKKPVPEKKVPVPAPKKVEAPPAKVPEVPKKLIPEEKKPTPVPKKVEAPPPKVPKKREPVPVPVALPQEEEVLFEEEIVPEEEVLPEEEEVLPEEEEVLPEEEEVLPEEEEIPPEEEEVPPEEEYVPEEEEFVPEEEVLPEVKPKVPVPAPVPEIKKKVTEKKVVIPKKEEAPPAKVPEVPKKVEEKRIILPKEEEVLPVEVTEEPEEEPISEEEIPEEPPSIEEVEEVAPPRVPEVIKKAVPEAPTPVPKKVEAPPAKVSKKIPEEKVPVPVQKKEAPPAKVPEVPKKVPEKKVLVPKKEAVPPAKGRTVLEEKVSVAFRQEVVVKERLELEVVEAEVEEIPEEEEFHEVEEYFEEGEFHEVEEFIKLEQHRVEEEHRVEKVHRVIEVFEAEEVEVFEKPKAPPKGPEISEKIIPPKKPPTKVVPRKEPPAKVPEVPKKIVVEEKVRVPEEPRVPPTKVPDVLPPKEVVPEKKVPVPPAKKPEAPPPKVPEAPKEVVPEKKVPVPPPKKPEVPPTKVPEVPKAAVPEKKVPEAIPPKPESPPPEVPEAPKEVVPEKKVPAAPPKKPEVTPVKVPEAPKEVVPEKKVPVPPPKKPEVPPTKVPEVPKVAVPEKKVPEAIPPKPESPPPEVFEEPEEVALEEPPAEVVEEPEPAAPPQVTVPPKKPVPEKKAPAVVAKKPELPPVKVPEVPKEVVPEKKVPLVVPKKPEAPPAKVPEVPKEVVPEKKVAVPKKPEVPPAKVPEVPKKPVLEEKPAVPVPERAESPPPEVYEEPEEIAPEEEIAPEEEKPVPVAEEEEPEVPPPAVPEEPKKIIPEKKVPVIKKPEAPPPKEPEPEKVIEKPKLKPRPPPPPPAPPKEDVKEKIFQLKAIPKKKVPEKPQVPEKVELTPLKVPGGEKKVRKLLPERKPEPKEEVVLKSVLRKRPEEEEPKVEPKKLEKVKKPAVPEPPPPKPVEEVEVPTVTKRERKIPEPTKVPEIKPAIPLPAPEPKPKPEAEVKTIKPPPVEPEPTPIAAPVTVPVVGKKAEAKAPKEEAAKPKGPIKGVPKKTPSPIEAERRKLRPGSGGEKPPDEAPFTYQLKAVPLKFVKEIKDIILTESEFVGSSAIFECLVSPSTAITTWMKDGSNIRESPKHRFIADGKDRKLHIIDVQLSDAGEYTCVLRLGNKEKTSTAKLVVEELPVRFVKTLEEEVTVVKGQPLYLSCELNKERDVVWRKDGKIVVEKPGRIVPGVIGLMRALTINDADDTDAGTYTVTVENANNLECSSCVKVVEVIRDWLVKPIRDQHVKPKGTAIFACDIAKDTPNIKWFKGYDEIPAEPNDKTEILRDGNHLYLKIKNAMPEDIAEYAVEIEGKRYPAKLTLGEREVELLKPIEDVTIYEKESASFDAEISEADIPGQWKLKGELLRPSPTCEIKAEGGKRFLTLRKVKLDQAGEVLYQALNAITTAILTVKEIELDFAVPLKDVTVPERRQARFECVLTREANVIWSKGPDIIKSSDKFDIIADGKKHILVINDSQFDDEGVYTAEVEGKKTSARLFVTGIRLKFMSPLEDQTVKEGETATFVCELSHEKMHVVWFKNDAKLHTSRTVLISSEGKTHKLEMKEVTLDDISQIKAQVKELSSTAQLKVLEADPYFTVKLHDKTAVEKDEITLKCEVSKDVPVKWFKDGEEIVPSPKYSIKADGLRRILKIKKADLKDKGEYVCDCGTDKTKANVTVEARLIKVEKPLYGVEVFVGETAHFEIELSEPDVHGQWKLKGQPLTASPDCEIIEDGKKHILILHNCQLGMTGEVSFQAANAKSAANLKVKELPLIFITPLSDVKVFEKDEAKFECEVSREPKTFRWLKGTQEITGDDRFELIKDGTKHSMVIKSAAFEDEAKYMFEAEDKHTSGKLIIEGIRLKFLTPLKDVTAKEKESAVFTVELSHDNIRVKWFKNDQRLHTTRSVSMQDEGKTHSITFKDLSIDDTSQIRVEAMGMSSEAKLTVLEGDPYFTGKLQDYTGVEKDEVILQCEISKADAPVKWFKDGKEIKPSKNAVIKADGKKRMLILKKALKSDIGQYTCDCGTDKTSGKLDIEDREIKLVRPLHSVEVMETETARFETEISEDDIHANWKLKGEALLQTPDCEIKEEGKIHSLVLHNCRLDQTGGVDFQAANVKSSAHLRVKPRVIGLLRPLKDVTVTAGETATFDCELSYEDIPVEWYLKGKKLEPSDKVVPRSEGKVHTLTLRDVKLEDAGEVQLTAKDFKTHANLFVKEPPVEFTKPLEDQTVEEGATAVLECEVSRENAKVKWFKNGTEILKSKKYEIVADGRVRKLVIHDCTPEDIKTYTCDAKDFKTSCNLNVVPPHVEFLRPLTDLQVREKEMARFECELSRENAKVKWFKDGAEIKKGKKYDIISKGAVRILVINKCLLDDEAEYSCEVRTARTSGMLTVLEEEAVFTKNLANIEVSETDTIKLVCEVSKPGAEVIWYKGDEEIIETGRYEILTEGRKRILVIQNAHLEDAGNYNCRLPSSRTDGKVKVHELAAEFISKPQNLEILEGEKAEFVCSISKESFPVQWKRDDKTLESGDKYDVIADGKKRVLVVKDATLQDMGTYVVMVGAARAAAHLTVIEKLRIVVPLKDTRVKEQQEVVFNCEVNTEGAKAKWFRNEEAIFDSSKYIILQKDLVYTLRIRDAHLDDQANYNVSLTNHRGENVKSAANLIVEEEDLRIVEPLKDIETMEKKSVTFWCKVNRLNVTLKWTKNGEEVPFDNRVSYRVDKYKHMLTIKDCGFPDEGEYIVTAGQDKSVAELLIIEAPTEFVEHLEDQTVTEFDDAVFSCQLSREKANVKWYRNGREIKEGKKYKFEKDGSIHRLIIKDCRLDDECEYACGVEDRKSRARLFVEEIPVEIIRPPQDILEAPGADVVFLAELNKDKVEVQWLRNNMVVVQGDKHQMMSEGKIHRLQICDIKPRDQGEYRFIAKDKEARAKLELAAAPKIKTADQDLVVDVGKPLTMVVPYDAYPKAEAEWFKENEPLSTKTIDTTAEQTSFRILEAKKGDKGRYKIVLQNKHGKAEGFINLKVIDVPGPVRNLEVTETFDGEVSLAWEEPLTDGGSKIIGYVVERRDIKRKTWVLATDRAESCEFTVTGLQKGGVEYLFRVSARNRVGTGEPVETDNPVEARSKYDVPGPPLNVTITDVNRFGVSLTWEPPEYDGGAEITNYVIELRDKTSIRWDTAMTVRAEDLSATVTDVVEGQEYSFRVRAQNRIGVGKPSAATPFVKVADPIERPSPPVNLTSSDQTQSSVQLKWEPPLKDGGSPILGYIIERCEEGKDNWIRCNMKLVPELTYKVTGLEKGNKYLYRVSAENKAGVSDPSEILGPLTADDAFVEPTMDLSAFKDGLEVIVPNPITILVPSTGYPRPTATWCFGDKVLETGDRVKMKTLSAYAELVISPSERSDKGIYTLKLENRVKTISGEIDVNVIARPSAPKELKFGDITKDSVHLTWEPPDDDGGSPLTGYVVEKREVSRKTWTKVMDFVTDLEFTVPDLVQGKEYLFKVCARNKCGPGEPAYVDEPVNMSTPATVPDPPENVKWRDRTANSIFLTWDPPKNDGGSRIKGYIVERCPRGSDKWVACGEPVAETKMEVTGLEEGKWYAYRVKALNRQGASKPSRPTEEIQAVDTQEAPEIFLDVKLLAGLTVKAGTKIELPATVTGKPEPKITWTKADMILKQDKRITIENVPKKSTVTIVDSKRSDTGTYIIEAVNVCGRATAVVEVNVLDKPGPPAAFDITDVTNESCLLTWNPPRDDGGSKITNYVVERRATDSEVWHKLSSTVKDTNFKATKLIPNKEYIFRVAAENMYGVGEPVQASPITAKYQFDPPGPPTRLEPSDITKDAVTLTWCEPDDDGGSPITGYWVERLDPDTDKWVRCNKMPVKDTTYRVKGLTNKKKYRFRVLAENLAGPGKPSKSTEPILIKDPIDPPWPPGKPTVKDVGKTSVRLNWTKPEHDGGAKIESYVIEMLKTGTDEWVRVAEGVPTTQHLLPGLMEGQEYSFRVRAVNKAGESEPSEPSDPVLCREKLYPPSPPRWLEVINITKNTADLKWTVPEKDGGSPITNYIVEKRDVRRKGWQTVDTTVKDTKCTVTPLTEGSLYVFRVAAENAIGQSDYTEIEDSVLAKDTFTTPGPPYALAVVDVTKRHVDLKWEPPKNDGGRPIQRYVIEKKERLGTRWVKAGKTAGPDCNFRVTDVIEGTEVQFQVRAENEAGVGHPSEPTEILSIEDPTSPPSPPLDLHVTDAGRKHIAIAWKPPEKNGGSPIIGYHVEMCPVGTEKWMRVNSRPIKDLKFKVEEGVVPDKEYVLRVRAVNAIGVSEPSEISENVVAKDPDCKPTIDLETHDIIVIEGEKLSIPVPFRAVPVPTVSWHKDGKEVKASDRLTMKNDHISAHLEVPKSVRADAGIYTITLENKLGSATASINVKVIGLPGPCKDIKASDITKSSCKLTWEPPEFDGGTPILHYVLERREAGRRTYIPVMSGENKLSWTVKDLIPNGEYFFRVKAVNKVGGGEYIELKNPVIAQDPKQPPDPPVDVEVHNPTAEAMTITWKPPLYDGGSKIMGYIIEKIAKGEERWKRCNEHLVPILTYTAKGLEEGKEYQFRVRAENAAGISEPSRATPPTKAVDPIDAPKVILRTSLEVKRGDEIALDASISGSPYPTITWIKDENVIVPEEIKKRAAPLVRRRKGEVQEEEPFVLPLTQRLSIDNSKKGESQLRVRDSLRPDHGLYMIKVENDHGIAKAPCTVSVLDTPGPPINFVFEDIRKTSVLCKWEPPLDDGGSEIINYTLEKKDKTKPDSEWIVVTSTLRHCKYSVTKLIEGKEYLFRVRAENRFGPGPPCVSKPLVAKDPFGPPDAPDKPIVEDVTSNSMLVKWNEPKDNGSPILGYWLEKREVNSTHWSRVNKSLLNALKANVDGLLEGLTYVFRVCAENAAGPGKFSPPSDPKTAHDPISPPGPPIPRVTDTSSTTIELEWEPPAFNGGGEIVGYFVDKQLVGTNEWSRCTEKMIKVRQYTVKEIREGADYKLRVSAVNAAGEGPPGETQPVTVAEPQEPPAVELDVSVKGGIQIMAGKTLRIPAVVTGRPVPTKVWTKEEGELDKDRVVIDNVGTKSELIIKDALRKDHGRYVITATNSCGSKFAAARVEVFDVPGPVLDLKPVVTNRKMCLLNWSDPEDDGGSEITGFIIERKDAKMHTWRQPIETERSKCDITGLLEGQEYKFRVIAKNKFGCGPPVEIGPILAVDPLGPPTSPERLTYTERTKSTITLDWKEPRSNGGSPIQGYIIEKRRHDKPDFERVNKRLCPTTSFLVENLDEHQMYEFRVKAVNEIGESEPSLPLNVVIQDDEVPPTIKLRLSVRGDTIKVKAGEPVHIPADVTGLPMPKIEWSKNETVIEKPTDALQITKEEVSRSEAKTELSIPKAVREDKGTYTVTASNRLGSVFRNVHVEVYDRPSPPRNLAVTDIKAESCYLTWDAPLDNGGSEITHYVIDKRDASRKKAEWEEVTNTAVEKRYGIWKLIPNGQYEFRVRAVNKYGISDECKSDKVVIQDPYRLPGPPGKPKVLARTKGSMLVSWTPPLDNGGSPITGYWLEKREEGSPYWSRVSRAPITKVGLKGVEFNVPRLLEGVKYQFRAMAINAAGIGPPSEPSDPEVAGDPIFPPGPPSCPEVKDKTKSSISLGWKPPAKDGGSPIKGYIVEMQEEGTTDWKRVNEPDKLITTCECVVPNLKELRKYRFRVKAVNEAGESEPSDTTGEIPATDIQEEPEVFIDIGAQDCLVCKAGSQIRIPAVIKGRPTPKSSWEFDGKAKKAMKDGVHDIPEDAQLETAENSSVIIIPECKRSHTGKYSITAKNKAGQKTANCRVKVMDVPGPPKDLKVSDITRGSCRLSWKMPDDDGGDRIKGYVIEKRTIDGKAWTKVNPDCGSTTFVVPDLLSEQQYFFRVRAENRFGIGPPVETIQRTTARDPIYPPDPPIKLKIGLITKNTVHLSWKPPKNDGGSPVTHYIVECLAWDPTGTKKEAWRQCNKRDVEELQFTVEDLVEGGEYEFRVKAVNAAGVSKPSATVGPCDCQRPDMPPSIDLKEFMEVEEGTNVNIVAKIKGVPFPTLTWFKAPPKKPDNKEPVLYDTHVNKLVVDDTCTLVIPQSRRSDTGLYTITAVNNLGTASKEMRLNVLGRPGPPVGPIKFESVSADQMTLSWFPPKDDGGSKITNYVIEKREANRKTWVHVSSEPKECTYTIPKLLEGHEYVFRIMAQNKYGIGEPLDSEPETARNLFSVPGAPDKPTVSSVTRNSMTVNWEEPEYDGGSPVTGYWLEMKDTTSKRWKRVNRDPIKAMTLGVSYKVTGLIEGSDYQFRVYAINAAGVGPASLPSDPATARDPIAPPGPPFPKVTDWTKSSADLEWSPPLKDGGSKVTGYIVEYKEEGKEEWEKGKDKEVRGTKLVVTGLKEGAFYKFRVSAVNIAGIGEPGEVTDVIEMKDRLVSPDLQLDASVRDRIVVHAGGVIRIIAYVSGKPPPTVTWNMNERTLPQEATIETTAISSSMVIKNCQRSHQGVYSLLAKNEAGERKKTIIVDVLDVPGPVGTPFLAHNLTNESCKLTWFSPEDDGGSPITNYVIEKRESDRRAWTPVTYTVTRQNATVQGLIQGKAYFFRIAAENSIGMGPFVETSEALVIREPITVPERPEDLEVKEVTKNTVTLTWNPPKYDGGSEIINYVLESRLIGTEKFHKVTNDNLLSRKYTVKGLKEGDTYEYRVSAVNIVGQGKPSFCTKPITCKDELAPPTLHLDFRDKLTIRVGEAFALTGRYSGKPKPKVSWFKDEADVLEDDRTHIKTTPATLALEKIKAKRSDSGKYCVVVENSTGSRKGFCQVNVVDRPGPPVGPVSFDEVTKDYMVISWKPPLDDGGSKITNYIIEKKEVGKDVWMPVTSASAKTTCKVSKLLEGKDYIFRIHAENLYGISDPLVSDSMKAKDRFRVPDAPDQPIVTEVTKDSALVTWNKPHDGGKPITNYILEKRETMSKRWARVTKDPIHPYTKFRVPDLLEGCQYEFRVSAENEIGIGDPSPPSKPVFAKDPIAKPSPPVNPEAIDTTCNSVDLTWQPPRHDGGSKILGYIVEYQKVGDEEWRRANHTPESCPETKYKVTGLRDGQTYKFRVLAVNAAGESDPAHVPEPVLVKDRLEPPELILDANMAREQHIKVGDTLRLSAIIKGVPFPKVTWKKEDRDAPTKARIDVTPVGSKLEIRNAAHEDGGIYSLTVENPAGSKTVSVKVLVLDKPGPPRDLEVSEIRKDSCYLTWKEPLDDGGSVITNYVVERRDVASAQWSPLSATSKKKSHFAKHLNEGNQYLFRVAAENQYGRGPFVETPKPIKALDPLHPPGPPKDLHHVDVDKTEVSLVWNKPDRDGGSPITGYLVEYQEEGTQDWIKFKTVTNLECVVTGLQQGKTYRFRVKAENIVGLGLPDTTIPIECQEKLVPPSVELDVKLIEGLVVKAGTTVRFPAIIRGVPVPTAKWTTDGSEIKTDEHYTVETDNFSSVLTIKNCLRRDTGEYQITVSNAAGSKTVAVHLTVLDVPGPPTGPINILDVTPEHMTISWQPPKDDGGSPVINYIVEKQDTRKDTWGVVSSGSSKTKLKIPHLQKGCEYVFRVRAENKIGVGPPLDSTPTVAKHKFSPPSPPGKPVVTDITENAATVSWTLPKSDGGSPITGYYMERREVTGKWVRVNKTPIADLKFRVTGLYEGNTYEFRVFAENLAGLSKPSPSSDPIKACRPIKPPGPPINPKLKDKSRETADLVWTKPLSDGGSPILGYVVECQKPGTAQWNRINKDELIRQCAFRVPGLIEGNEYRFRIKAANIVGEGEPRELAESVIAKDILHPPEVELDVTCRDVITVRVGQTIRILARVKGRPEPDITWTKEGKVLVREKRVDLIQDLPRVELQIKEAVRADHGKYIISAKNSSGHAQGSAIVNVLDRPGPCQNLKVTNVTKENCTISWENPLDNGGSEITNFIVEYRKPNQKGWSIVASDVTKRLIKANLLANNEYYFRVCAENKVGVGPTIETKTPILAINPIDRPGEPENLHIADKGKTFVYLKWRRPDYDGGSPNLSYHVERRLKGSDDWERVHKGSIKETHYMVDRCVENQIYEFRVQTKNEGGESDWVKTEEVVVKEDLQKPVLDLKLSGVLTVKAGDTIRLEAGVRGKPFPEVAWTKDKDATDLTRSPRVKIDTRADSSKFSLTKAKRSDGGKYVVTATNTAGSFVAYATVNVLDKPGPVRNLKIVDVSSDRCTVCWDPPEDDGGCEIQNYILEKCETKRMVWSTYSATVLTPGTTVTRLIEGNEYIFRVRAENKIGTGPPTESKPVIAKTKYDKPGRPDPPEVTKVSKEEMTVVWNPPEYDGGKSITGYFLEKKEKHSTRWVPVNKSAIPERRMKVQNLLPDHEYQFRVKAENEIGIGEPSLPSRPVVAKDPIEPPGPPTNFRVVDTTKHSITLGWGKPVYDGGAPIIGYVVEMRPKIADASPDEGWKRCNAAAQLVRKEFTVTSLDENQEYEFRVCAQNQVGIGRPAELKEAIKPKEILEPPEIDLDASMRKLVIVRAGCPIRLFAIVRGRPAPKVTWRKVGIDNVVRKGQVDLVDTMAFLVIPNSTRDDSGKYSLTLVNPAGEKAVFVNVRVLDTPGPVSDLKVSDVTKTSCHVSWAPPENDGGSQVTHYIVEKREADRKTWSTVTPEVKKTSFHVTNLVPGNEYYFRVTAVNEYGPGVPTDVPKPVLASDPLSEPDPPRKLEVTEMTKNSATLAWLPPLRDGGAKIDGYITSYREEEQPADRWTEYSVVKDLSLVVTGLKEGKKYKFRVAARNAVGVSLPREAEGVYEAKEQLLPPKILMPEQITIKAGKKLRIEAHVYGKPHPTCKWKKGEDEVVTSSHLAVHKADSSSILIIKDVTRKDSGYYSLTAENSSGTDTQKIKVVVMDAPGPPQPPFDISDIDADACSLSWHIPLEDGGSNITNYIVEKCDVSRGDWVTALASVTKTSCRVGKLIPGQEYIFRVRAENRFGISEPLTSPKMVAQFPFGVPSEPKNARVTKVNKDCIFVAWDRPDSDGGSPIIGYLIERKERNSLLWVKANDTLVRSTEYPCAGLVEGLEYSFRIYALNKAGSSPPSKPTEYVTARMPVDPPGKPEVIDVTKSTVSLIWARPKHDGGSKIIGYFVEACKLPGDKWVRCNTAPHQIPQEEYTATGLEEKAQYQFRAIARTAVNISPPSEPSDPVTILAENVPPRIDLSVAMKSLLTVKAGTNVCLDATVFGKPMPTVSWKKDGTLLKPAEGIKMAMQRNLCTLELFSVNRKDSGDYTITAENSSGSKSATIKLKVLDKPGPPASVKINKMYSDRAMLSWEPPLEDGGSEITNYIVDKRETSRPNWAQVSATVPITSCSVEKLIEGHEYQFRICAENKYGVGDPVFTEPAIAKNPYDPPGRCDPPVISNITKDHMTVSWKPPADDGGSPITGYLLEKRETQAVNWTKVNRKPIIERTLKATGLQEGTEYEFRVTAINKAGPGKPSDASKAAYARDPQYPPAPPAFPKVYDTTRSSVSLSWGKPAYDGGSPIIGYLVEVKRADSDNWVRCNLPQNLQKTRFEVTGLMEDTQYQFRVYAVNKIGYSDPSDVPDKHYPKDILIPPEGELDADLRKTLILRAGVTMRLYVPVKGRPPPKITWSKPNVNLRDRIGLDIKSTDFDTFLRCENVNKYDAGKYILTLENSCGKKEYTIVVKVLDTPGPPVNVTVKEISKDSAYVTWEPPIIDGGSPIINYVVQKRDAERKSWSTVTTECSKTSFRVANLEEGKSYFFRVFAENEYGIGDPGETRDAVKASQTPGPVVDLKVRSVSKSSCSIGWKKPHSDGGSRIIGYVVDFLTEENKWQRVMKSLSLQYSAKDLTEGKEYTFRVSAENENGEGTPSEITVVARDDVVAPDLDLKGLPDLCYLAKENSNFRLKIPIKGKPAPSVSWKKGEDPLATDTRVSVESSAVNTTLIVYDCQKSDAGKYTITLKNVAGTKEGTISIKVVGKPGIPTGPIKFDEVTAEAMTLKWAPPKDDGGSEITNYILEKRDSVNNKWVTCASAVQKTTFRVTRLHEGMEYTFRVSAENKYGVGEGLKSEPIVARHPFDVPDAPPPPNIVDVRHDSVSLTWTDPKKTGGSPITGYHLEFKERNSLLWKRANKTPIRMRDFKVTGLTEGLEYEFRVMAINLAGVGKPSLPSEPVVALDPIDPPGKPEVINITRNSVTLIWTEPKYDGGHKLTGYIVEKRDLPSKSWMKANHVNVPECAFTVTDLVEGGKYEFRIRAKNTAGAISAPSESTETIICKDEYEAPTIVLDPTIKDGLTIKAGDTIVLNAISILGKPLPKSSWSKAGKDIRPSDITQITSTPTSSMLTIKYATRKDAGEYTITATNPFGTKVEHVKVTVLDVPGPPGPVEISNVSAEKATLTWTPPLEDGGSPIKSYILEKRETSRLLWTVVSEDIQSCRHVATKLIQGNEYIFRVSAVNHYGKGEPVQSEPVKMVDRFGPPGPPEKPEVSNVTKNTATVSWKRPVDDGGSEITGYHVERREKKSLRWVRAIKTPVSDLRCKVTGLQEGSTYEFRVSAENRAGIGPPSEASDSVLMKDAAYPPGPPSNPHVTDTTKKSASLAWGKPHYDGGLEITGYVVEHQKVGDEAWIKDTTGTALRITQFVVPDLQTKEKYNFRISAINDAGVGEPAVIPDVEIVEREMAPDFELDAELRRTLVVRAGLSIRIFVPIKGRPAPEVTWTKDNINLKNRANIENTESFTLLIIPECNRYDTGKFVMTIENPAGKKSGFVNVRVLDTPGPVLNLRPTDITKDSVTLHWDLPLIDGGSRITNYIVEKREATRKSYSTATTKCHKCTYKVTGLSEGCEYFFRVMAENEYGIGEPTETTEPVKASEAPSPPDSLNIMDITKSTVSLAWPKPKHDGGSKITGYVIEAQRKGSDQWTHITTVKGLECVVRNLTEGEEYTFQVMAVNSAGRSAPRESRPVIVKEQTMLPELDLRGIYQKLVIAKAGDNIKVEIPVLGRPKPTVTWKKGDQILKQTQRVNFETTATSTILNINECVRSDSGPYPLTARNIVGEVGDVITIQVHDIPGPPTGPIKFDEVSSDFVTFSWDPPENDGGVPISNYVVEMRQTDSTTWVELATTVIRTTYKATRLTTGLEYQFRVKAQNRYGVGPGITSACIVANYPFKVPGPPGTPQVTAVTKDSMTISWHEPLSDGGSPILGYHVERKERNGILWQTVSKALVPGNIFKSSGLTDGIAYEFRVIAENMAGKSKPSKPSEPMLALDPIDPPGKPVPLNITRHTVTLKWAKPEYTGGFKITSYIVEKRDLPNGRWLKANFSNILENEFTVSGLTEDAAYEFRVIAKNAAGAISPPSEPSDAITCRDDVEAPKIKVDVKFKDTVILKAGEAFRLEADVSGRPPPTMEWSKDGKELEGTAKLEIKIADFSTNLVNKDSTRRDSGAYTLTATNPGGFAKHIFNVKVLDRPGPPEGPLAVTEVTSEKCVLSWFPPLDDGGAKIDHYIVQKRETSRLAWTNVASEVQVTKLKVTKLLKGNEYIFRVMAVNKYGVGEPLESEPVLAVNPYGPPDPPKNPEVTTITKDSMVVCWGHPDSDGGSEIINYIVERRDKAGQRWIKCNKKTLTDLRYKVSGLTEGHEYEFRIMAENAAGISAPSPTSPFYKACDTVFKPGPPGNPRVLDTSRSSISIAWNKPIYDGGSEITGYMVEIALPEEDEWQIVTPPAGLKATSYTITGLTENQEYKIRIYAMNSEGLGEPALVPGTPKAEDRMLPPEIELDADLRKVVTIRACCTLRLFVPIKGRPAPEVKWARDHGESLDKASIESTSSYTLLIVGNVNRFDSGKYILTVENSSGSKSAFVNVRVLDTPGPPQDLKVKEVTKTSVTLTWDPPLLDGGSKIKNYIVEKRESTRKAYSTVATNCHKTSWKVDQLQEGCSYYFRVLAENEYGIGLPAETAESVKASERPLPPGKITLMDVTRNSVSLSWEKPEHDGGSRILGYIVEMQTKGSDKWATCATVKVTEATITGLIQGEEYSFRVSAQNEKGISDPRQLSVPVIAKDLVIPPAFKLLFNTFTVLAGEDLKVDVPFIGRPTPAVTWHKDNVPLKQTTRVNAESTENNSLLTIKDACREDVGHYVVKLTNSAGEAIETLNVIVLDKPGPPTGPVKMDEVTADSITLSWGPPKYDGGSSINNYIVEKRDTSTTTWQIVSATVARTTIKACRLKTGCEYQFRIAAENRYGKSTYLNSEPTVAQYPFKVPGPPGTPVVTLSSRDSMEVQWNEPISDGGSRVIGYHLERKERNSILWVKLNKTPIPQTKFKTTGLEEGVEYEFRVSAENIVGIGKPSKVSECYVARDPCDPPGRPEAIIVTRNSVTLQWKKPTYDGGSKITGYIVEKKELPEGRWMKASFTNIIDTHFEVTGLVEDHRYEFRVIARNAAGVFSEPSESTGAITARDEVDPPRISMDPKYKDTIVVHAGESFKVDADIYGKPIPTIQWIKGDQELSNTARLEIKSTDFATSLSVKDAVRVDSGNYILKAKNVAGERSVTVNVKVLDRPGPPEGPVVISGVTAEKCTLAWKPPLQDGGSDIINYIVERRETSRLVWTVVDANVQTLSCKVTKLLEGNEYTFRIMAVNKYGVGEPLESEPVVAKNPFVVPDAPKAPEVTTVTKDSMIVVWERPASDGGSEILGYVLEKRDKEGIRWTRCHKRLIGELRLRVTGLIENHDYEFRVSAENAAGLSEPSPPSAYQKACDPIYKPGPPNNPKVIDITRSSVFLSWSKPIYDGGCEIQGYIVEKCDVSVGEWTMCTPPTGINKTNIEVEKLLEKHEYNFRICAINKAGVGEHADVPGPIIVEEKLEAPDIDLDLELRKIINIRAGGSLRLFVPIKGRPTPEVKWGKVDGEIRDAAIIDVTSSFTSLVLDNVNRYDSGKYTLTLENSSGTKSAFVTVRVLDTPSPPVNLKVTEITKDSVSITWEPPLLDGGSKIKNYIVEKREATRKSYAAVVTNCHKNSWKIDQLQEGCSYYFRVTAENEYGIGLPAQTADPIKVAEVPQPPGKITVDDVTRNSVSLSWTKPEHDGGSKIIQYIVEMQAKHSEKWSECARVKSLQAVITNLTQGEEYLFRVVAVNEKGRSDPRSLAVPIVAKDLVIEPDVKPAFSSYSVQVGQDLKIEVPISGRPKPTITWTKDGLPLKQTTRINVTDSLDLTTLSIKETHKDDGGQYGITVANVVGQKTASIEIVTLDKPDPPKGPVKFDDVSAESITLSWNPPLYTGGCQITNYIVQKRDTTTTVWDVVSATVARTTLKVTKLKTGTEYQFRIFAENRYGQSFALESDPIVAQYPYKEPGPPGTPFATAISKDSMVIQWHEPVNNGGSPVIGYHLERKERNSILWTKVNKTIIHDTQFKAQNLEEGIEYEFRVYAENIVGVGKASKNSECYVARDPCDPPGTPEPIMVKRNEITLQWTKPVYDGGSMITGYIVEKRDLPDGRWMKASFTNVIETQFTVSGLTEDQRYEFRVIAKNAAGAISKPSDSTGPITAKDEVELPRISMDPKFRDTIVVNAGETFRLEADVHGKPLPTIEWLRGDKEIEESARCEIKNTDFKALLIVKDAIRIDGGQYILRASNVAGSKSFPVNVKVLDRPGPPEGPVQVTGVTSEKCSLTWSPPLQDGGSDISHYVVEKRETSRLAWTVVASEVVTNSLKVTKLLEGNEYVFRIMAVNKYGVGEPLESAPVLMKNPFVLPGPPKSLEVTNIAKDSMTVCWNRPDSDGGSEIIGYIVEKRDRSGIRWIKCNKRRITDLRLRVTGLTEDHEYEFRVSAENAAGVGEPSPATVYYKACDPVFKPGPPTNAHIVDTTKNSITLAWGKPIYDGGSEILGYVVEICKADEEEWQIVTPQTGLRVTRFEISKLTEHQEYKIRVCALNKVGLGEATSVPGTVKPEDKLEAPELDLDSELRKGIVVRAGGSARIHIPFKGRPTPEITWSREEGEFTDKVQIEKGVNYTQLSIDNCDRNDAGKYILKLENSSGSKSAFVTVKVLDTPGPPQNLAVKEVRKDSAFLVWEPPIIDGGAKVKNYVIDKRESTRKAYANVSSKCSKTSFKVENLTEGAIYYFRVMAENEFGVGVPVETVDAVKAAEPPSPPGKVTLTDVSQTSASLMWEKPEHDGGSRVLGYVVEMQPKGTEKWSIVAESKVCNAVVTGLSSGQEYQFRVKAYNEKGKSDPRVLGVPVIAKDLTIQPSLKLPFNTYSIQAGEDLKIEIPVIGRPRPNISWVKDGEPLKQTTRVNVEETATSTVLHIKEGNKDDFGKYTVTATNSAGTATENLSVIVLEKPGPPVGPVRFDEVSADFVVISWEPPAYTGGCQISNYIVEKRDTTTTTWHMVSATVARTTIKITKLKTGTEYQFRIFAENRYGKSAPLDSKAVIVQYPFKEPGPPGTPFVTSISKDQMLVQWHEPVNDGGTKIIGYHLEQKEKNSILWVKLNKTPIQDTKFKTTGLDEGLEYEFKVSAENIVGIGKPSKVSECFVARDPCDPPGRPEAIVITRNNVTLKWKKPAYDGGSKITGYIVEKKDLPDGRWMKASFTNVLETEFTVSGLVEDQRYEFRVIARNAAGNFSEPSDSSGAITARDEIDAPNASLDPKYKDVIVVHAGETFVLEADIRGKPIPDVVWSKDGKELEETAARMEIKSTIQKTTLVVKDCIRTDGGQYILKLSNVGGTKSIPITVKVLDRPGPPEGPLKVTGVTAEKCYLAWNPPLQDGGANISHYIIEKRETSRLSWTQVSTEVQALNYKVTKLLPGNEYIFRVMAVNKYGIGEPLESGPVTACNPYKPPGPPSTPEVSAITKDSMVVTWARPVDDGGTEIEGYILEKRDKEGVRWTKCNKKTLTDLRLRVTGLTEGHSYEFRVAAENAAGVGEPSEPSVFYRACDALYPPGPPSNPKVTDTSRSSVSLAWSKPIYDGGAPVKGYVVEVKEAAADEWTTCTPPTGLQGKQFTVTKLKENTEYNFRICAINSEGVGEPATLPGSVVAQERIEPPEIELDADLRKVVVLRASATLRLFVTIKGRPEPEVKWEKAEGILTDRAQIEVTSSFTMLVIDNVTRFDSGRYNLTLENNSGSKTAFVNVRVLDSPSAPVNLTIREVKKDSVTLSWEPPLIDGGAKITNYIVEKRETTRKAYATITNNCTKTTFRIENLQEGCSYYFRVLASNEYGIGLPAETTEPVKVSEPPLPPGRVTLVDVTRNTATIKWEKPESDGGSKITGYVVEMQTKGSEKWSTCTQVKTLEATISGLTAGEEYVFRVAAVNEKGRSDPRQLGVPVIARDIEIKPSVELPFHTFNVKAREQLKIDVPFKGRPQATVNWRKDGQTLKETTRVNVSSSKTVTSLSIKEASKEDVGTYELCVSNSAGSITVPITIIVLDRPGPPGPIRIDEVSCDSITISWNPPEYDGGCQISNYIVEKKETTSTTWHIVSQAVARTSIKIVRLTTGSEYQFRVCAENRYGKSSYSESSAVVAEYPFSPPGPPGTPKVVHATKSTMLVTWQVPVNDGGSRVIGYHLEYKERSSILWSKANKILIADTQMKVSGLDEGLMYEYRVYAENIAGIGKCSKSCEPVPARDPCDPPGQPEVTNITRKSVSLKWSKPHYDGGAKITGYIVERRELPDGRWLKCNYTNIQETYFEVTELTEDQRYEFRVFARNAADSVSEPSESTGPIIVKDDVEPPRVMMDVKFRDVIVVKAGEVLKINADIAGRPLPVISWAKDGIEIEERARTEIISTDNHTLLTVKDCIRRDTGQYVLTLKNVAGTRSVAVNCKVLDKPGPPAGPLEINGLTAEKCSLSWGRPQEDGGADIDYYIVEKRETSHLAWTICEGELQMTSCKVTKLLKGNEYIFRVTGVNKYGVGEPLESVAIKALDPFTVPSPPTSLEITSVTKESMTLCWSRPESDGGSEISGYIIERREKNSLRWVRVNKKPVYDLRVKSTGLREGCEYEYRVYAENAAGLSLPSETSPLIRAEDPVFLPSPPSKPKIVDSGKTTITIAWVKPLFDGGAPITGYTVEYKKSDDTDWKTSIQSLRGTEYTISGLTTGAEYVFRVKSVNKVGASDPSDSSDPQIAKEREEEPLFDIDSEMRKTLIVKAGASFTMTVPFRGRPVPNVLWSKPDTDLRTRAYVDTTDSRTSLTIENANRNDSGKYTLTIQNVLSAASLTLVVKVLDTPGPPTNITVQDVTKESAVLSWDVPENDGGAPVKNYHIEKREASKKAWVSVTNNCNRLSYKVTNLQEGAIYYFRVSGENEFGVGIPAETKEGVKITEKPSPPEKLGVTSISKDSVSLTWLKPEHDGGSRIVHYVVEALEKGQKNWVKCAVAKSTHHVVSGLRENSEYFFRVFAENQAGLSDPRELLLPVLIKEQLEPPEIDMKNFPSHTVYVRAGSNLKVDIPISGKPLPKVTLSRDGVPLKATMRFNTEITAENLTINLKESVTADAGRYEITAANSSGTTKAFINIVVLDRPGPPTGPVVISDITEESVTLKWEPPKYDGGSQVTNYILLKRETSTAVWTEVSATVARTMMKVMKLTTGEEYQFRIKAENRFGISDHIDSACVTVKLPYTTPGPPSTPWVTNVTRESITVGWHEPVSNGGSAVVGYHLEMKDRNSILWQKANKLVIRTTHFKVTTISAGLIYEFRVYAENAAGVGKPSHPSEPVLAIDACEPPRNVRITDISKNSVSLSWQQPAFDGGSKITGYIVERRDLPDGRWTKASFTNVTETQFIISGLTQNSQYEFRVFARNAVGSISNPSEVVGPITCIDSYGGPVIDLPLEYTEVVKYRAGTSVKLRAGISGKPAPTIEWYKDDKELQTNALVCVENTTDLASILIKDADRLNSGCYELKLRNAMGSASATIRVQILDKPGPPGGPIEFKTVTAEKITLLWRPPADDGGAKITHYIVEKRETSRVVWSMVSEHLEECIITTTKIIKGNEYIFRVRAVNKYGIGEPLESDSVVAKNAFVTPGPPGIPEVTKITKNSMTVVWSRPIADGGSDISGYFLEKRDKKSLGWFKVLKETIRDTRQKVTGLTENSDYQYRVCAVNAAGQGPFSEPSEFYKAADPIDPPGPPAKIRIADSTKSSITLGWSKPVYDGGSAVTGYVVEIRQGEEEEWTTVSTKGEVRTTEYVVSNLKPGVNYYFRVSAVNCAGQGEPIEMNEPVQAKDILEAPEIDLDVALRTSVIAKAGEDVQVLIPFKGRPPPTVTWRKDEKNLGSDARYSIENTDSSSLLTIPQVTRNDTGKYILTIENGVGEPKSSTVSVKVLDTPAACQKLQVKHVSRGTVTLLWDPPLIDGGSPIINYVIEKRDATKRTWSVVSHKCSSTSFKLIDLSEKTPFFFRVLAENEIGIGEPCETTEPVKAAEVPAPIRDLSMKDSTKTSVILSWTKPDFDGGSVITEYVVERKGKGEQTWSHAGISKTCEIEVSQLKEQSVLEFRVFAKNEKGLSDPVTIGPITVKELIITPEVDLSDIPGAQVTVRIGHNVHLELPYKGKPKPSISWLKDGLPLKESEFVRFSKTENKITLSIKNAKKEHGGKYTVILDNAVCRIAVPITVITLGPPSKPKGPIRFDEIKADSVILSWDVPEDNGGGEITCYSIEKRETSQTNWKMVCSSVARTTFKVPNLVKDAEYQFRVRAENRYGVSQPLVSSIIVAKHQFRIPGPPGKPVIYNVTSDGMSLTWDAPVYDGGSEVTGFHVEKKERNSILWQKVNTSPISGREYRATGLVEGLDYQFRVYAENSAGLSSPSDPSKFTLAVSPVDPPGTPDYIDVTRETITLKWNPPLRDGGSKIVGYSIEKRQGNERWVRCNFTDVSECQYTVTGLSPGDRYEFRIIARNAVGTISPPSQSSGIIMTRDENVPPIVEFGPEYFDGLIIKSGESLRIKALVQGRPVPRVTWFKDGVEIEKRMNMEITDVLGSTSLFVRDATRDHRGVYTVEAKNASGSAKAEIKVKVQDTPGKVVGPIRFTNITGEKMTLWWDAPLNDGCAPITHYIIEKRETSRLAWALIEDKCEAQSYTAIKLINGNEYQFRVSAVNKFGVGRPLDSDPVVAQIQYTVPDAPGIPEPSNITGNSITLTWARPESDGGSEIQQYILERREKKSTRWVKVISKRPISETRFKVTGLTEGNEYEFHVMAENAAGVGPASGISRLIKCREPVNPPGPPTVVKVTDTSKTTVSLEWSKPVFDGGMEIIGYIIEMCKADLGDWHKVNAEACVKTRYTVTDLQAGEEYKFRVSAINGAGKGDSCEVTGTIKAVDRLTAPELDIDANFKQTHVVRAGASIRLFIAYQGRPTPTAVWSKPDSNLSLRADIHTTDSFSTLTVENCNRNDAGKYTLTVENNSGSKSITFTVKVLDTPGPPGPITFKDVTRGSATLMWDAPLLDGGARIHHYVVEKREASRRSWQVISEKCTRQIFKVNDLAEGVPYYFRVSAVNEYGVGEPYEMPEPIVATEQPAPPRRLDVVDTSKSSAVLAWLKPDHDGGSRITGYLLEMRQKGSDFWVEAGHTKQLTFTVERLVEKTEYEFRVKAKNDAGYSEPREAFSSVIIKEPQIEPTADLTGITNQLITCKAGSPFTIDVPISGRPAPKVTWKLEEMRLKETDRVSITTTKDRTTLTVKDSMRGDSGRYFLTLENTAGVKTFSVTVVVIGRPGPVTGPIEVSSVSAESCVLSWGEPKDGGGTEITNYIVEKRESGTTAWQLVNSSVKRTQIKVTHLTKYMEYSFRVSSENRFGVSKPLESAPIIAEHPFVPPSAPTRPEVYHVSANAMSIRWEEPYHDGGSKIIGYWVEKKERNTILWVKENKVPCLECNYKVTGLVEGLEYQFRTYALNAAGVSKASEASRPIMAQNPVDAPGRPEVTDVTRSTVSLIWSAPAYDGGSKVVGYIIERKPVSEVGDGRWLKCNYTIVSDNFFTVTALSEGDTYEFRVLAKNAAGVISKGSESTGPVTCRDEYAPPKAELDARLHGDLVTIRAGSDLVLDAAVGGKPEPKIIWTKGDKELDLCEKVSLQYTGKRATAVIKFCDRSDSGKYTLTVKNASGTKAVSVMVKVLDSPGPCGKLTVSRVTQEKCTLAWSLPQEDGGAEITHYIVERRETSRLNWVIVEGECPTLSYVVTRLIKNNEYIFRVRAVNKYGPGVPVESEPIVARNSFTIPSPPGIPEEVGTGKEHIIIQWTKPESDGGNEISNYLVDKREKKSLRWTRVNKDYVVYDTRLKVTSLMEGCDYQFRVTAVNAAGNSEPSEASNFISCREPSYTPGPPSAPRVVDTTKHSISLAWTKPMYDGGTDIVGYVLEMQEKDTDQWYRVHTNATIRNTEFTVPDLKMGQKYSFRVAAVNVKGMSEYSESIAEIEPVERIEIPDLELADDLKKTVTIRAGASLRLMVSVSGRPPPVITWSKQGIDLASRAIIDTTESYSLLIVDKVNRYDAGKYTIEAENQSGKKSATVLVKVYDTPGPCPSVKVKEVSRDSVTITWEIPTIDGGAPVNNYIVEKREAAMRAFKTVTTKCSKTLYRISGLVEGTMYYFRVLPENIYGIGEPCETSDAVLVSEVPLVPAKLEVVDVTKSTVTLAWEKPLYDGGSRLTGYVLEACKAGTERWMKVVTLKPTVLEHTVTSLNEGEQYLFRIRAQNEKGVSEPRETVTAVTVQDLRVLPTIDLSTMPQKTIHVPAGRPVELVIPIAGRPPPAASWFFAGSKLRESERVTVETHTKVAKLTIRETTIRDTGEYTLELKNVTGTTSETIKVIILDKPGPPTGPIKIDEIDATSITISWEPPELDGGAPLSGYVVEQRDAHRPGWLPVSESVTRSTFKFTRLTEGNEYVFRVAATNRFGIGSYLQSEVIECRSSIRIPGPPETLQIFDVSRDGMTLTWYPPEDDGGSQVTGYIVERKEVRADRWVRVNKVPVTMTRYRSTGLTEGLEYEHRVTAINARGSGKPSRPSKPIVAMDPIAPPGKPQNPRVTDTTRTSVSLAWSVPEDEGGSKVTGYLIEMQKVDQHEWTKCNTTPTKIREYTLTHLPQGAEYRFRVLACNAGGPGEPAEVPGTVKVTEMLEYPDYELDERYQEGIFVRQGGVIRLTIPIKGKPFPICKWTKEGQDISKRAMIATSETHTELVIKEADRGDSGTYDLVLENKCGKKAVYIKVRVIGSPNSPEGPLEYDDIQVRSVRVSWRPPADDGGADILGYILERREVPKAAWYTIDSRVRGTSLVVKGLKENVEYHFRVSAENQFGISKPLKSEEPVTPKTPLNPPEPPSNPPEVLDVTKSSVSLSWSRPKDDGGSRVTGYYIERKETSTDKWVRHNKTQITTTMYTVTGLVPDAEYQFRIIAQNDVGLSETSPASEPVVCKDPFDKPSQPGELEILSISKDSVTLQWEKPECDGGKEILGYWVEYRQSGDSAWKKSNKERIKDKQFTIGGLLEATEYEFRVFAENETGLSRPRRTAMSIKTKLTSGEAPGIRKEMKDVTTKLGEAAQLSCQIVGRPLPDIKWYRFGKELIQSRKYKMSSDGRTHTLTVMTEEQEDEGVYTCIATNEVGEVETSSKLLLQATPQFHPGYPLKEKYYGAVGSTLRLHVMYIGRPVPAMTWFHGQKLLQNSENITIENTEHYTHLVMKNVQRKTHAGKYKVQLSNVFGTVDAILDVEIQDKPDKPTGPIVIEALLKNSAVISWKPPADDGGSWITNYVVEKCEAKEGAEWQLVSSAISVTTCRIVNLTENAGYYFRVSAQNTFGISDPLEVSSVVIIKSPFEKPGAPGKPTITAVTKDSCVVAWKPPASDGGAKIRNYYLEKREKKQNKWISVTTEEIRETVFSVKNLIEGLEYEFRVKCENLGGESEWSEISEPITPKSDVPIQAPHFKEELRNLNVRYQSNATLVCKVTGHPKPIVKWYRQGKEIIADGLKYRIQEFKGGYHQLIIASVTDDDATVYQVRATNQGGSVSGTASLEVEVPAKIHLPKTLEGMGAVHALRGEVVSIKIPFSGKPDPVITWQKGQDLIDNNGHYQVIVTRSFTSLVFPNGVERKDAGFYVVCAKNRFGIDQKTVELDVADVPDPPRGVKVSDVSRDSVNLTWTEPASDGGSKITNYIVEKCATTAERWLRVGQARETRYTVINLFGKTSYQFRVIAENKFGLSKPSEPSEPTITKEDKTRAMNYDEEVDETREVSMTKASHSSTKELYEKYMIAEDLGRGEFGIVHRCVETSSKKTYMAKFVKVKGTDQVLVKKEISILNIARHRNILHLHESFESMEELVMIFEFISGLDIFERINTSAFELNEREIVSYVHQVCEALQFLHSHNIGHFDIRPENIIYQTRRSSTIKIIEFGQARQLKPGDNFRLLFTAPEYYAPEVHQHDVVSTATDMWSLGTLVYVLLSGINPFLAETNQQIIENIMNAEYTFDEEAFKEISIEAMDFVDRLLVKERKSRMTASEALQHPWLKQKIERVSTKVIRTLKHRRYYHTLIKKDLNMVVSAARISCGGAIRSQKGVSVAKVKVASIEIGPVSGQIMHAVGEEGGHVKYVCKIENYDQSTQVTWYFGVRQLENSEKYEITYEDGVAILYVKDITKLDDGTYRCKVVNDYGEDSSYAELFVKGVREVYDYYCRRTMKKIKRRTDTMRLLERPPEFTLPLYNKTAYVGENVRFGVTITVHPEPHVTWYKSGQKIKPGDNDKKYTFESDKGLYQLTINSVTTDDDAEYTVVARNKYGEDSCKAKLTVTLHPPPTDSTLRPMFKRLLANAECQEGQSVCFEIRVSGIPPPTLKWEKDGQPLSLGPNIEIIHEGLDYYALHIRDTLPEDTGYYRVTATNTAGSTSCQAHLQVERLRYKKQEFKSKEEHERHVQKQIDKTLRMAEILSGTESVPLTQVAKEALREAAVLYKPAVSTKTVKGEFRLEIEEKKEERKLRMPYDVPEPRKYKQTTIEEDQRIKQFVPMSDMKWYKKIRDQYEMPGKLDRVVQKRPKRIRLSRWEQFYVMPLPRITDQYRPKWRIPKLSQDDLEIVRPARRRTPSPDYDFYYRPRRRSLGDISDEELLLPIDDYLAMKRTEEERLRLEEELELGFSASPPSRSPPHFELSSLRYSSPQAHVKVEETRKDFRYSTYHIPTKAEASTSYAELRERHAQAAYRQPKQRQRIMAEREDEELLRPVTTTQHLSEYKSELDFMSKEEKSRKKSRRQREVTEITEIEEEYEISKHAQRESSSSASRLLRRRRSLSPTYIELMRPVSELIRSRPQPAEEYEDDTERRSPTPERTRPRSPSPVSSERSLSRFERSARFDIFSRYESMKAALKTQKTSERKYEVLSQQPFTLDHAPRITLRMRSHRVPCGQNTRFILNVQSKPTAEVKWYHNGVELQESSKIHYTNTSGVLTLEILDCHTDDSGTYRAVCTNYKGEASDYATLDVTGGDYTTYASQRRDEEVPRSVFPELTRTEAYAVSSFKKTSEMEASSSVREVKSQMTETRESLSSYEHSASAEMKSAALEEKSLEEKSTTRKIKTTLAARILTKPRSMTVYEGESARFSCDTDGEPVPTVTWLRKGQVLSTSARHQVTTTKYKSTFEISSVQASDEGNYSVVVENSEGKQEAEFTLTIQKARVTEKAVTSPPRVKSPEPRVKSPEAVKSPKRVKSPEPSHPKAVSPTETKPTPTEKVQHLPVSAPPKITQFLKAEASKEIAKLTCVVESSVLRAKEVTWYKDGKKLKENGHFQFHYSADGTYELKINNLTESDQGEYVCEISGEGGTSKTNLQFMGQAFKSIHEKVSKISETKKSDQKTTESTVTRKTEPKAPEPISSKPVIVTGLQDTTVSSDSVAKFAVKATGEPRPTAIWTKDGKAITQGGKYKLSEDKGGFFLEIHKTDTSDSGLYTCTVKNSAGSVSSSCKLTIKAIKDTEAQKVSTQKTSEITPQKKAVVQEEISQKALRSEEIKMSEAKSQEKLALKEEASKVLISEEVKKSAATSLEKSIVHEEITKTSQASEEVRTHAEIKAFSTQMSINEGQRLVLKANIAGATDVKWVLNGVELTNSEEYRYGVSGSDQTLTIKQASHRDEGILTCISKTKEGIVKCQYDLTLSKELSDAPAFISQPRSQNINEGQNVLFTCEISGEPSPEIEWFKNNLPISISSNVSISRSRNVYSLEIRNASVSDSGKYTIKAKNFRGQCSATASLMVLPLVEEPSREVVLRTSGDTSLQGSFSSQSVQMSASKQEASFSSFSSSSASSMTEMKFASMSAQSMSSMQESFVEMSSSSFMGISNMTQLESSTSKMLKAGIRGIPPKIEALPSDISIDEGKVLTVACAFTGEPTPEVTWSCGGRKIHSQEQGRFHIENTDDLTTLIIMDVQKQDGGLYTLSLGNEFGSDSATVNIHIRSI

SEQ ID NO: 395 - DNA, 1248 bp, Homo sapiens
  AF272363
atgtcagggatggaaaaacttcagaatgcttcctggatctaccagcagaaactagaagatccattccagaaacacctgaacagcaccgaggagtatctggccttcctctgcggacctcggcgcagccacttcttcctccccgtgtctgtggtgtatgtgccaatttttgtggtgggggtcattggcaatgtcctggtgtgcctggtgattctgcagcaccaggctatgaagacgcccaccaactactacctcttcagcctggcggtctctgacctcctggtcctgctccttggaatgcccctggaggtctatgagatgtggcgcaactaccctttcttgttcgggcccgtgggctgctacttcaagacggccctctttgagaccgtgtgcttcgcctccatcctcagcatcaccaccgtcagcgtggagcgctacgtggccatcctacacccgttccgcgccaaactgcagagcacccggcgccgggccctcaggatcctcggcatcgtctggggcttctccgtgctcttctccctgcccaacaccagcatccatggcatcaagttccactacttccccaatgggtccctggtcccaggttcggccacctgtacggtcatcaagcccatgtggatctacaatttcatcatccaggtcacctccttcctattctacctcctccccatgactgtcatcagtgtcctctactacctcatggcactcagactaaagaaagacaaatctcttgaggcagatgaagggaatgcaaatattcaaagaccctgcagaaaatcagtcaacaagatgctgtttgtcttggtcttagtgtttgctatctgttgggccccgttccacattgaccgactcttcttcagctttgtggaggagtggagtgaatccctggctgctgtgttcaacctcgtccatgtggtgtcaggtgtcttcttctacctgagctcagctgtcaaccccattatctataacctactgtctcgccgcttccaggcagcattccagaatgtgatctcttctttccacaaacagtggcactcccagcatgacccacagttgccacctgcccagcggaacatcttcctgacagaatgccactttgtggagctgaccgaagatataggtccccaattcccatgtcagtcatccatgcacaactctcacctcccaacagccctctctagtgaacagatgtcaagaacaaactatcaaagcttccactttaacaaaacctga

SEQ ID NO: 396 - protein, 415 aa, Homo sapiens [sequence omitted]

SEQ ID NO: 397 - DNA, 3153 bp, Homo sapiens
  AF045458
atggagcccggccgcggcggcacagagaccgtgggcaagttcgagttctcccgcaaggacctgatcggccacggcgccttcgcggtggtcttcaagggccgccaccgcgagaagcacgatttggaggtcgccgtcaagtgcattaacaagaagaacctcgccaagtctcagacgctgctggggaaggaaatcaaaatcctgaaggaactgaaacatgaaaacatcgtggccctgtacgacttccaggaaatggctaattctgtctacctggttatggagtactgcaacggtggggacctggccgactacctgcacgccatgcgcacgctgagcgaggacaccatcaggctcttcctgcagcagatcgcgggcgccatgcggcttctgcacagcaaaggcatcatccaccgcgacctgaaaccgcagaacatcctgctgtccaaccccgccggccgccgcgccaaccccaacagcatccgcgtcaagatcgctgacttcggcttcgcgcggtacctccagagcaacatgatggcggccacactctgcggctcccccatgtacatggcccccgaggtcatcatgtcccagcactacgacgggaaggcggacctgtggagcatcggcaccatcgtctaccagtgcctgacggggaaggcgcccttccaggccagcagcccccaggacctgcgcctgttctacgagaagaacaagacgttggtccccaccatcccccgggagacctcggccccgctgcggcagctgctcctggccctactgcaacgcaaccacaaggaccgcatggacttcgatgagttttttcatcaccctttcctcgatgccagcccctcggtcaggaaatccccacccgtgcctgtgccctcgtacccaagctcggggtccggcagcagctccagcagcagctccacctcccacctggcctccccgccgtccctgggcgagatgcagcagctgcagaagaccctggcctccccggctgacaccgctggcttcctgcacagctcccgggactctggtggcagcaaggactcttcctgtgacacagacgacttcgtcatggtccccgcgcagtttccaggtgacctggtggctgaggcgcccagtgccaaacccccgccagacagcctgatgtgcagtgggagctcactggtggcctctgcgggcttggagagccacggccggaccccatctccatccccaccctgcagcagctcccccagtccctcaggccgggctggcccgttctccagcagcaggtgcggcgcctctgtccccatcccagtccccacgcaggtgcagaactaccagcgcattgagcgaaacctgcagtcacccacccagttccaaacacctcggtcctctgccatccgcaggtcaggcagcaccagccccctgggctttgcaagggccagcccctcgccccctgcccacgctgagcatggaggcgtcctggccaggaagatgtctctgggtggaggccggccctacacgccatctcctcaagttggaaccatccctgagcggccaggctggagcgggacgccctccccacagggagctgagatgcggggtggcaggtcccctcgtccaggctcctctgcacccgagcactctccccgcacttccgggctgggctgccgcctgcacagcgcccccaacctgtctgacttgcacgtcgtccgccccaagctgcccaaaccccccacggaccccctgggagctgtgttcagcccaccacaggccagccctccccagccgtcccacggcctgcagtcctgccggaacctgcggggctcacccaagctgcccgacttcctgcagcgaaaccccctgccccccatcctgggctcccccaccaaggctgtgccctcctttgacttcccgaagacccccagctcccagaacctgctggccctcctagcccggcagggcgtggtgatgacgccccctcgaaaccggacgctgcccgacctctcggaggtgggacccttccatggtcagccgttgggccctggcctgcggccaggcgaggaccccaagggcccctttggccggtctttcagcaccagccgcctcactgacctgctccttaaggcggcgtttgggacacaagccccggacccgggcagcacggagagcctgcaggagaagcccatggagatcgcaccctcagctggctttggagggagcctgcacccaggagcccgtgctgggggcaccagcagcccctccccggtggtcttcaccgtgggctctcccccgagcgggagcacgcccccccagggcccccgcaccaggatgttctcagcgggccccactggctctgccagctcttctgcccgccacctggtgcctgggccctgcagcgaggccccagcccctgagctccctgctccaggacacggctgcagctttgccgaccccattgctgcgaacctggagggggctgtgaccttcgaggcccccgacctccctgaggagaccctcatggagcaagagcacacggagatcctgcgtggcctgcgcttcacgctgctgttcgtgcagcacgtcctggagatcgcagccctgaagggcagcgccagtgaggcggcggggggccctgagtaccagctgcaggagagtgtggtggccgaccagatcagcctgctgagccgagaatggggcttcgcggaacagctggtgctgtacctgaaggtggccgagctactgtcctccggcctgcaaagtgccatcgaccagatccgggccggcaagctctgcctgtcgtccactgtgaagcaggtggtgcgcaggctgaatgagctgtacaaggccagcgtggtgtcctgccagggcctgagcctgcggctgcagcgcttcttcctggacaagcagcggctcctggaccgcattcacagcatcactgccgagaggctcatcttcagccacgctgtgcagatggtgcagtcggctgccctggacgagatgttccagcaccgtgagggctgcgtcccacgctaccacaaggccctgctgctcctggaggggctgcagcacatgctctcggaccaggccgacatcgagaacgtcaccaagtgcaagctgtgcattgagcggagactctcggcgctgctgactggcatctgtgcctga

SEQ ID NO: 398 - protein, 1050 aa, Homo sapiens
  O75385
MEPGRGGTETVGKFEFSRKDLIGHGAFAVVFKGRHREKHDLEVAVKCINKKNLAKSQTLLGKEIKILKELKHENIVALYDFQEMANSVYLVMEYCNGGDLADYLHAMRTLSEDTIRLFLQQIAGAMRLLHSKGIIHRDLKPQNILLSNPAGRRANPNSIRVKIADFGFARYLQSNMMAATLCGSPMYMAPEVIMSQHYDGKADLWSIGTIVYQCLTGKAPFQASSPQDLRLFYEKNKTLVPTIPRETSAPLRQLLLALLQRNHKDRMDFDEFFHHPFLDASPSVRKSPPVPVPSYPSSGSGSSSSSSSTSHLASPPSLGEMQQLQKTLASPADTAGFLHSSRDSGGSKDSSCDTDDFVMVPAQFPGDLVAEAPSAKPPPDSLMCSGSSLVASAGLESHGRTPSPSPPCSSSPSPSGRAGPFSSSRCGASVPIPVPTQVQNYQRIERNLQSPTQFQTPRSSAIRRSGSTSPLGFARASPSPPAHAEHGGVLARKMSLGGGRPYTPSPQVGTIPERPGWSGTPSPQGAEMRGGRSPRPGSSAPEHSPRTSGLGCRLHSAPNLSDLHVVRPKLPKPPTDPLGAVFSPPQASPPQPSHGLQSCRNLRGSPKLPDFLQRNPLPPILGSPTKAVPSFDFPKTPSSQNLLALLARQGVVMTPPRNRTLPDLSEVGPFHGQPLGPGLRPGEDPKGPFGRSFSTSRLTDLLLKAAFGTQAPDPGSTESLQEKPMEIAPSAGFGGSLHPGARAGGTSSPSPVVFTVGSPPSGSTPPQGPRTRMFSAGPTGSASSSARHLVPGPCSEAPAPELPAPGHGCSFADPIAANLEGAVTFEAPDLPEETLMEQEHTEILRGLRFTLLFVQHVLEIAALKGSASEAAGGPEYQLQESVVADQISLLSREWGFAEQLVLYLKVAELLSSGLQSAIDQIRAGKLCLSSTVKQVVRRLNELYKASVVSCQGLSLRLQRFFLDKQRLLDRIHSITAERLIFSHAVQMVQSAALDEMFQHREGCVPRYHKALLLLEGLQHMLSDQADIENVTKCKLCIERRLSALLTGICA

SEQ ID NO: 399 - DNA, 1089 bp, Homo sapiens
  U90338
atggcagctgctgaggaggagccgaagcccaaaaagctgaaggtggaggcgccgcaagcgctgagagaaaatattctctttggaatgggaaatcctctgcttgacatctctgctgtagtggacaaagatttccttgataagtattctctgaaaccaaatgaccaaatcttggctgaagacaaacacaaggaactgtttgatgaacttgtgaaaaaattcaaagtcgaatatcatgctggtggctctacccagaattcaattaaagtggctcagtggatgattcaacagccacacaaagcagcaacattttttggatgcattgggatagataaatttggggagatcctgaagagaaaagctgctgaagcccatgtggatgctcattactacgagcagaatgagcagccaacaggaacttgtgctgcatgcatcactggtgacaacaggtccctcatagctaatcttgctgctgccaattgttataaaaaggaaaaacatcttgatctggagaaaaactggatgttggtagaaaaagcaagagtttgttatatagcaggcttttttcttacagtttccccagagtcagtattaaaggtggctcaccatgcttctgaaaacaacaggattttcactttgaatctatctgcaccgtttattagccagttctacaaggaatcattgatgaaagttatgccttatgttgatatactttttggaaatgagacagaagctgccacttttgctagagagcaaggctttgagactaaagacattaaagagatagccaaaaagacacaagccctgccaaagatgaactcaaagaggcagcgaatcgtgatcttcacccaagggagagatgacactataatggctacagaaagtgaagtcactgcttttgctgtcttggatcaagaccagaaagaaattattgataccaatggagctggagatgcatttgttggaggttttctgtctcaactggtctctgacaagcctctgactgaatgtatccgtgctggccactatgcagcaagcatcataattagacggactggctgcacctttcctgagaagccagacttccactga

SEQ ID NO: 400 - protein, 362 aa, Homo sapiens
  P55263
MAAAEEEPKPKKLKVEAPQALRENILFGMGNPLLDISAVVDKDFLDKYSLKPNDQILAEDKHKELFDELVKKFKVEYHAGGSTQNSIKVAQWMIQQPHKAATFFGCIGIDKFGEILKRKAAEAHVDAHYYEQNEQPTGTCAACITGDNRSLIANLAAANCYKKEKHLDLEKNWMLVEKARVCYIAGFFLTVSPESVLKVAHHASENNRIFTLNLSAPFISQFYKESLMKVMPYVDILFGNETEAATFAREQGFETKDIKEIAKKTQALPKMNSKRQRIVIFTQGRDDTIMATESEVTAFAVLDQDQKEIIDTNGAGDAFVGGFLSQLVSDKPLTECIRAGHYAASIIIRRTGCTFPEKPDFH

SEQ ID NO: 401 - DNA, 3111 bp, Homo sapiens
  L13738
atgcagccagaggagggcacaggctggctgctggagctgctgtccgaggtgcagctgcaacagtacttcctgcggctccgagatgacctcaacgtcacccgcctgtcccactttgagtacgtcaagaatgaggacctggagaagatcggcatgggtcggcctggccagcggcggctgtgggaggctgtgaagaggaggaaggccttgtgcaaacgcaagtcgtggatgagtaaggtgttcagtggaaagcgactggaggctgagttcccacctcatcactctcagagcaccttccggaagacctcgcccgcccctgggggcccagcaggggaggggcccctgcagagcctcacctgcctcattggggagaaggacctgcgcctcctggagaagctgggtgatggttcctttggcgtggtgcgcaggggcgagtgggacgcgccctcagggaagacggtgagtgtggctgtgaagtgcctgaagcccgatgtcctgagccagccagaagccatggacgacttcatccgggaggtcaatgccatgcactcgctcgaccaccgaaacctcatccgcctctacggggtggtgctcacgccgcccatgaagatggtgacagagctggcacctctgggatcgttgttggaccggctacgtaagcaccagggccacttcctcctggggactctgagccgctacgctgtgcaggtggctgagggcatgggctacctggagtccaagcgctttattcaccgtgacctggctgcccgcaatctgctgttggctacccgcgacctggtcaagatcggggactttgggctgatgcgagcactacctcagaatgacgaccattacgtcatgcaggaacatcgcaaggtgcccttcgcctggtgtgcccccgagagcctgaagacacgcaccttctcccatgccagcgacacctggatgttcggggtgacactgtgggaaatgttcacctacggccaggagccctggatcggcctcaacggcagtcagatcctgcataagatcgacaaggagggggagcggctgccccggcccgaggactgtccccaggacatctacaacgtcatggtccagtgctgggctcacaagccagaggacagacccacgtttgtggccctgcgggacttcctgctggaggcccagcccacagacatgcgggcccttcaggactttgaggaaccggacaagctgcacatccagatgaatgatgtcatcaccgtcatcgagggaagggccgagaactactggtggcgtggccagaacacacggacgctgtgtgtggggcccttccctcgcaacgtggtgacctccgtggccggcctgtcggcccaggacatcagccagcccctgcagaacagcttcatccacacagggcatggcgacagtgacccccgccactgctggggcttcccggacaggattgacgaactgtatctgggaaaccccatggacccccccgacctcctgagcgtggaactgagcacctcccggcccccccagcatctaggaggggtgaaaaaaccaacctatgaccctgtgagcgaggaccaagaccccttgtccagcgacttcaagaggctgggcctgcggaagccaggcctgccccgagggctgtggctggcgaagccctcggcgcgggtgccgggcaccaaggccagccgaggcagcggggctgaggtcacgctcatcgacttcggtgaggagcccgtggtcccggccctacggccctgcccgccctccctggcgcagctggccatggacgcctgctccctgctggacgagaccccgcctcagagccccacgcgggcactgccccggcccctgcaccccacgcctgtggtggactgggacgcacgcccgctgccccccccgcccgcctatgacgacgtggcccaggatgaggatgactttgagatctgctccatcaacagcaccctcgtgggcgcgggggtccctgccgggcccagccagggccagaccaactacgcctttgtgcctgagcaggcgcggccgccccctcccctggaggacaacctgttcctcccgccccagggtgggggcaagccgcccagctccgcacagaccgcagagatcttccaggcgctacagcaggagtgcatgaggcaactgcaggctccgggctccccggccccctctcccagcccggggggtgacgacaagccccaggtgcctcctcgggtacccatcccccctcggcccacgcgcccacacgtccagctgtctccagcccccccgggcgaggaggagaccagccagtggcctggacctgcttcccctccccgggtgcctccgcgggagcccctgtcccctcaaggctcgaggacacccagccccctggtaccacctggcagctccccgctgccaccccggctctcaagctcacctgggaagaccatgcccaccacccagagctttgcctcagaccccaagtacgccaccccccaggtgatccaggcccctggcgcgggtggtccctgcatcctgcccatcgtccgggatggcaagaaggtcagcagcacccactattacttgctgcccgagcgaccatcctacctggagcgctaccagcgcttcctgcgtgaggcccagagccccgaggagcctacccccctgcctgtgcctctgctgctgcccccacccagcaccccagcccccgccgcccccacggccaccgtgcggccgatgccccaggctgccttggaccccaaggccaacttctccaccaacaacagcaacccaggggcccggccaccacccccgagggccactgctcggctgccacagaggggctgccctggcgatgggccagaggcgggccggccagcagacaagatccagatggccatggtgcatggggtgaccacagaggagtgccaggcggccctgcagtgccacggctggagcgtgcagagggctgcccagtatctgaaggtggagcagctcttcgggctgggtctgcggcccagaggggagtgccacaaagtgctggagatgttcgactggaacctggagcaggccggctgccaccttctgggctcctggggccctgcccaccacaagcgctga

SEQ ID NO: 402 - protein, 1036 aa, Homo sapiens
  Q07912
MQPEEGTGWLLELLSEVQLQQYFLRLRDDLNVTRLSHFEYVKNEDLEKIGMGRPGQRRLWEAVKRRKALCKRKSWMSKVFSGKRLEAEFPPHHSQSTFRKTSPAPGGPAGEGPLQSLTCLIGEKDLRLLEKLGDGSFGVVRRGEWDAPSGKTVSVAVKCLKPDVLSQPEAMDDFIREVNAMHSLDHRNLIRLYGVVLTPPMKMVTELAPLGSLLDRLRKHQGHFLLGTLSRYAVQVAEGMGYLESKRFIHRDLAARNLLLATRDLVKIGDFGLMRALPQNDDHYVMQEHRKVPFAWCAPESLKTRTFSHASDTWMFGVTLWEMFTYGQEPWIGLNGSQILHKIDKEGERLPRPEDCPQDIYNVMVQCWAHKPEDRPTFVALRDFLLEAQPTDMRALQDFEEPDKLHIQMNDVITVIEGRAENYWWRGQNTRTLCVGPFPRNVVTSVAGLSAQDISQPLQNSFIHTGHGDSDPRHCWGFPDRIDELYLGNPMDPPDLLSVELSTSRPPQHLGGVKKPTYDPVSEDQDPLSSDFKRLGLRKPGLPRGLWLAKPSARVPGTKASRGSGAEVTLIDFGEEPVVPALRPCPPSLAQLAMDACSLLDETPPQSPTRALPRPLHPTPVVDWDARPLPPPPAYDDVAQDEDDFEICSINSTLVGAGVPAGPSQGQTNYAFVPEQARPPPPLEDNLFLPPQGGGKPPSSAQTAEIFQALQQECMRQLQAPGSPAPSPSPGGDDKPQVPPRVPIPPRPTRPHVQLSPAPPGEEETSQWPGPASPPRVPPREPLSPQGSRTPSPLVPPGSSPLPPRLSSSPGKTMPTTQSFASDPKYATPQVIQAPGAGGPCILPIVRDGKKVSSTHYYLLPERPSYLERYQRFLREAQSPEEPTPLPVPLLLPPPSTPAPAAPTATVRPMPQAALDPKANFSTNNSNPGARPPPPRATARLPQRGCPGDGPEAGRPADKIQMAMVHGVTTEECQAALQCHGWSVQRAAQYLKVEQLFGLGLRPRGECHKVLEMFDWNLEQAGCHLLGSWGPAHHKR

SEQ ID NO: 403 - DNA, 3393 bp, Homo sapiens
  X16416
atgttggagatctgcctgaagctggtgggctgcaaatccaagaaggggctgtcctcgtcctccagctgttatctggaagaagcccttcagcggccagtagcatctgactttgagcctcagggtctgagtgaagccgctcgttggaactccaaggaaaaccttctcgctggacccagtgaaaatgaccccaaccttttcgttgcactgtatgattttgtggccagtggagataacactctaagcataactaaaggtgaaaagctccgggtcttaggctataatcacaatggggaatggtgtgaagcccaaaccaaaaatggccaaggctgggtcccaagcaactacatcacgccagtcaacagtctggagaaacactcctggtaccatgggcctgtgtcccgcaatgccgctgagtatctgctgagcagcgggatcaatggcagcttcttggtgcgtgagagtgagagcagtcctggccagaggtccatctcgctgagatacgaagggagggtgtaccattacaggatcaacactgcttctgatggcaagctctacgtctcctccgagagccgcttcaacaccctggccgagttggttcatcatcattcaacggtggccgacgggctcatcaccacgctccattatccagccccaaagcgcaacaagcccactgtctatggtgtgtcccccaactacgacaagtgggagatggaacgcacggacatcaccatgaagcacaagctgggcgggggccagtacggggaggtgtacgagggcgtgtggaagaaatacagcctgacggtggccgtgaagaccttgaaggaggacaccatggaggtggaagagttcttgaaagaagctgcagtcatgaaagagatcaaacaccctaacctggtgcagctccttggggtctgcacccgggagcccccgttctatatcatcactgagttcatgacctacgggaacctcctggactacctgagggagtgcaaccggcaggaggtgaacgccgtggtgctgctgtacatggccactcagatctcgtcagccatggagtacctggagaagaaaaacttcatccacagagatcttgctgcccgaaactgcctggtaggggagaaccacttggtgaaggtagctgattttggcctgagcaggttgatgacaggggacacctacacagcccatgctggagccaagttccccatcaaatggactgcacccgagagcctggcctacaacaagttctccatcaagtccgacgtctgggcatttggagtattgctttgggaaattgctacctatggcatgtccccttacccgggaattgacctgtcccaggtgtatgagctgctagagaaggactaccgcatggagcgcccagaaggctgcccagagaaggtctatgaactcatgcgagcatgttggcagtggaatccctctgaccggccctcctttgctgaaatccaccaagcctttgaaacaatgttccaggaatccagtatctcagacgaagtggaaaaggagctggggaaacaaggcgtccgtggggctgtgagtaccttgctgcaggccccagagctgcccaccaagacgaggacctccaggagagctgcagagcacagagacaccactgacgtgcctgagatgcctcactccaagggccagggagagagcgatcctctggaccatgagcctgccgtgtctccattgctccctcgaaaagagcgaggtcccccggagggcggcctgaatgaagatgagcgccttctccccaaagacaaaaagaccaacttgttcagcgccttgatcaagaagaagaagaagacagccccaacccctcccaaacgcagcagctccttccgggagatggacggccagccggagcgcagaggggccggcgaggaagagggccgagacatcagcaacggggcactggctttcacccccttggacacagctgacccagccaagtccccaaagcccagcaatggggctggggtccccaatggagccctccgggagtccgggggctcaggcttccggtctccccacctgtggaagaagtccagcacgctgaccagcagccgcctagccaccggcgaggaggagggcggtggcagctccagcaagcgcttcctgcgctcttgctccgcctcctgcgttccccatggggccaaggacacggagtggaggtcagtcacgctgcctcgggacttgcagtccacgggaagacagtttgactcgtccacatttggagggcacaaaagtgagaagccggctctgcctcggaagagggcaggggagaacaggtctgaccaggtgacccgaggcacagtaacgcctccccccaggctggtgaaaaagaatgaggaagctgctgatgaggtcttcaaagacatcatggagtccagcccgggctccagcccgcccaacctgactccaaaacccctccggcggcaggtcaccgtggcccctgcctcgggcctcccccacaaggaagaagctgaaaagggcagtgccttagggacccctgctgcagctgagccagtgacccccaccagcaaagcaggctcaggtgcaccagggggcaccagcaagggccccgccgaggagtccagagtgaggaggcacaagcactcctctgagtcgccagggagggacaaggggaaattgtccaggctcaaacctgccccgccgcccccaccagcagcctctgcagggaaggctggaggaaagccctcgcagagcccgagccaggaggcggccggggaggcagtcctgggcgcaaagacaaaagccacgagtctggttgatgctgtgaacagtgacgctgccaagcccagccagccgggagagggcctcaaaaagcccgtgctcccggccactccaaagccacagtccgccaagccgtcggggacccccatcagcccagcccccgttccctccacgttgccatcagcatcctcggccctggcaggggaccagccgtcttccactgccttcatccctctcatatcaacccgagtgtctcttcggaaaacccgccagcctccagagcggatcgccagcggcgccatcaccaagggcgtggtcctggacagcaccgaggcgctgtgcctcgccatctctaggaactccgagcagatggccagccacagcgcagtgctggaggccggcaaaaacctctacacgttctgcgtgagctatgtggattccatccagcaaatgaggaacaagtttgccttccgagaggccatcaacaaactggagaataatctccgggagcttcagatctgcccggcgacagcaggcagtggtccggcggccactcaggacttcagcaagctcctcagttcggtgaaggaaatcagtgacatagtgcagaggtag

SEQ ID NO: 404 - protein, 1130 aa, Homo sapiens [sequence omitted]

SEQ ID NO: 405 - DNA, 1596 bp, Homo sapiens
  M23725
atgtcgaagccccatagtgaagccgggactgccttcattcagacccagcagctgcacgcagccatggctgacacattcctggagcacatgtgccgcctggacattgattcaccacccatcacagcccggaacactggcatcatctgtaccattggcccagcttcccgatcagtggagacgttgaaggagatgattaagtctggaatgaatgtggctcgtctgaacttctctcatggaactcatgagtaccatgcggagaccatcaagaatgtgcgcacagccacggaaagctttgcttctgaccccatcctctaccggcccgttgctgtggctctagacactaaaggacctgagatccgaactgggctcatcaagggcagcggcactgcagaggtggagctgaagaagggagccactctcaaaatcacgctggataacgcctacatggaaaagtgtgacgagaacatcctgtggctggactacaagaacatctgcaaggtggtggaagtgggcagcaagatctacgtggatgatgggcttatttctctccaggtgaagcagaaaggtgccgacttcctggtgacggaggtggaaaatggtggctccttgggcagcaagaagggtgtgaaccttcctggggctgctgtggacttgcctgctgtgtcggagaaggacatccaggatctgaagtttggggtcgagcaggatgttgatatggtgtttgcgtcattcatccgcaaggcatctgatgtccatgaagttaggaaggtcctgggagagaagggaaagaacatcaagattatcagcaaaatcgagaatcatgagggggttcggaggtttgatgaaatcctggaggccagtgatgggatcatggtggctcgtggtgatctaggcattgagattcctgcagagaaggtcttccttgctcagaagatgatgattggacggtgcaaccgagctgggaagcctgtcatctgtgctactcagatgctggagagcatgatcaagaagccccgccccactcgggctgaaggcagtgatgtggccaatgcagtcctggatggagccgactgcatcatgctgtctggagaaacagccaaaggggactatcctctggaggctgtgcgcatgcagaacctgattgcccgtgaggcagaggctgccatctaccacttgcaattatttgaggaactccgccgcctggcgcccattaccagcgaccccacagaagccaccgccgtgggtgccgtggaggcctccttcaagtgctgcagtggggccataatcgtcctcaccaagtctggcaggtctgctcaccaggtggccagataccgcccacgtgcccccatcattgctgtgacccggaatccccagacagctcgtcaggcccacctgtaccgtggcatcttccctgtgctgtgcaaggacccagtccaggaggcctgggctgaggacgtggacctccgggtgaactttgccatgaatgttggcaaggcccgaggcttcttcaagaagggagatgtggtcattgtgctgaccggatggcgccctggctccggcttcaccaacaccatgcgtgttgttcctgtgccgtga

SEQ ID NO: 406 - protein, 531 aa, Homo sapiens; identical to SEQ ID NO: 244
  P14786

SEQ ID NO: 407 - DNA, 1512 bp, Homo sapiens
  M18907
atggctctcatcccagacttggccatggaaacctggcttctcctggctgtcagcctggtgctcctctatctatatggaacccattcacatggactttttaagaagcttggaattccagggcccacacctctgccttttttgggaaatattttgtcctaccataagggcttttgtatgtttgacatggaatgtcataaaaagtatggaaaagtgtggggcttttatgatggtcaacagcctgtgctggctatcacagatcctgacatgatcaaaacagtgctagtgaaagaatgttattctgtcttcacaaaccggaggccttttggtccagtgggatttatgaaaagtgccatctctatagctgaggatgaagaatggaagagattacgatcattgctgtctccaaccttcaccagtggaaaactcaaggagatggtccctatcattgcccagtatggagatgtgttggtgagaaatctgaggcgggaagcagagacaggcaagcctgtcaccttgaaagacgtctttggggcctacagcatggatgtgatcactagcacatcatttggagtgaacatcgactctctcaacaatccacaagacccctttgtggaaaacaccaagaagcttttaagatttgattttttggatccattctttctctcaataacagtctttccattcctcatcccaattcttgaagtattaaatatctgtgtgtttccaagagaagttacaaattttttaagaaaatctgtaaaaaggatgaaagaaagtcgcctcgaagatacacaaaagcaccgagtggatttccttcagctgatgattgactctcagaattcaaaagaaactgagtcccacaaagctctgtccgatctggagctcgtggcccaatcaattatctttatttttgctggctatgaaaccacgagcagtgttctctccttcattatgtatgaactggccactcaccctgatgtccagcagaaactgcaggaggaaattgatgcagttttacccaataaggcaccacccacctatgatactgtgctacagatggagtatcttgacatggtggtgaatgaaacgctcagattattcccaattgctatgagacttgagagggtctgcaaaaaagatgttgagatcaatgggatgttcattcccaaaggggtggtggtgatgattccaagctatgctcttcaccgtgacccaaagtactggacagagcctgagaagttcctccctgaaagattcagcaagaagaacaaggacaacatagatccttacatatacacaccctttggaagtggacccagaaactgcattggcatgaggtttgctctcatgaacatgaaacttgctctaatcagagtccttcagaacttctccttcaaaccttgtaaagaaacacagatccccctgaaattaagcttaggaggacttcttcaaccagaaaaacccgttgttctaaaggttgagtcaagggatggcaccgtaagtggagcctga

SEQ ID NO: 408 - protein, 503 aa, Homo sapiens [sequence omitted]

SEQ ID NO: 409 - RNA, 21 nt, Artificial sequence
  Ect2 siRNA COD1513
aagugggcuuuguaaagaugg

SEQ ID NO: 410 - protein, 16 aa, Artificial sequence
  Penetratin
RQIKIWFQNRRMKWKK

SEQ ID NO: 411 - DNA, 23 bp, Artificial sequence
  T7 RNA polymerase binding site sequence
taatacgactcactatagggaga

SEQ ID NO: 412 - DNA, 37 bp, Artificial sequence
  Primer
taatacgactcactatagggcgaattgggcccgacgt

SEQ ID NO: 413 - DNA, 48 bp, Artificial sequence
  Primer
taatacgactcactatagggcgatgcaggcggccgcgaattcactagt

SEQ ID NO: 414 - DNA, 53 bp, Artificial sequence
  Primer
gaattaatacgactcactatagggagaggccgcgaagcccgaggataagagca

SEQ ID NO: 415 - DNA, 55 bp, Artificial sequence
  Primer
gaattaatacgactcactatagggagagatgaccatatccgccgccggtttcctt

SEQ ID NO: 416 - DNA, 49 bp, Artificial sequence
  Primer
taatacgactcactatagggagacccgcattggccgaacacctggaacc

SEQ ID NO: 417 - DNA, 49 bp, Artificial sequence
  Primer
taatacgactcactatagggagaacgtcgagaccccgcacctgtagagt

SEQ ID NO: 418 - DNA, 49 bp, Artificial sequence
  Primer
taatacgactcactatagggagaaggtgcgagatctgttccagctgatt

SEQ ID NO: 419 - DNA, 49 bp, Artificial sequence
  Primer
taatacgactcactatagggagaagggcacaagcaatttgggtggatac

SEQ ID NO: 420 - DNA, 48 bp, Artificial sequence
  Primer
taatacgactcactatagggagatccgccggaatcgaattacctgttc

SEQ ID NO: 421 - DNA, 48 bp, Artificial sequence
  Primer
taatacgactcactatagggagaacttgatgggctcggcagatgagat

SEQ ID NO: 422 - DNA, 48 bp, Artificial sequence
  Primer
taatacgactcactatagggagaggcaaagaagcaccaacagaagtta

SEQ ID NO: 423 - DNA, 48 bp, Artificial sequence
  Primer
taatacgactcactatagggagatctgggctagcatattcacagagta

SEQ ID NO: 424 - DNA, 49 bp, Artificial sequence
  Primer
taatacgactcactatagggagactaccaaacagcggcaggttattcag

SEQ ID NO: 425 - DNA, 49 bp, Artificial sequence
  Primer
taatacgactcactatagggagagttgctgctgatatgccagtggttgt

SEQ ID NO: 426 - DNA, 48 bp, Artificial sequence
  Primer
taatacgactcactatagggagattagcaagggttggggcagcacact

SEQ ID NO: 427 - DNA, 48 bp, Artificial sequence
  Primer
taatacgactcactatagggagacactgcaggtagatcctcgccagtt

SEQ ID NO: 428 - DNA, 48 bp, Artificial sequence
  Primer
taatacgactcactatagggagacaatttccgatatgggcgcgaggac

SEQ ID NO: 429 - DNA, 48 bp, Artificial sequence
  Primer
taatacgactcactatagggagacttcaccaccttgttggagttgttg

SEQ ID NO: 430 - DNA, 48 bp, Artificial sequence
  Primer
taatacgactcactatagggagaggtggcagaacaaactggctgtggt

SEQ ID NO: 431 - DNA, 48 bp, Artificial sequence
  Primer
taatacgactcactatagggagaatggcggtgatggcaaacttggtgg

SEQ ID NO: 432 - DNA, 51 bp, Artificial sequence
  Primer
taatacgactcactatagggagaatgctttggctgctgttgcggtacaagt

SEQ ID NO: 433 - DNA, 48 bp, Artificial sequence
  Primer
taatacgactcactatagggagagcggagagtaactgaagcactggag

SEQ ID NO: 434 - DNA, 48 bp, Artificial sequence
  Primer
taatacgactcactatagggagaccgccggagaccataatctacaatg

SEQ ID NO: 435 - DNA, 48 bp, Artificial sequence
  Primer
taatacgactcactatagggagacgggcactggtactggttgtagata

SEQ ID NO: 436 - DNA, 48 bp, Artificial sequence
  Primer
taatacgactcactatagggagactgctgtcggtggcgtacaagaatg

SEQ ID NO: 437 - DNA, 48 bp, Artificial sequence
  Primer
taatacgactcactatagggagactcagtgtatccaactcggcaatgg

SEQ ID NO: 438 - DNA, 48 bp, Artificial sequence
  Primer
taatacgactcactatagggagaggagtctatacggcgggtcaaggag

SEQ ID NO: 439 - DNA, 48 bp, Artificial sequence
  Primer
taatacgactcactatagggagagagcctgtgtacccgaggtggaaag

SEQ ID NO: 440 - DNA, 48 bp, Artificial sequence
  Primer
taatacgactcactatagggagagaagttcgacgacaagaagatacag

SEQ ID NO: 441 - DNA, 48 bp, Artificial sequence
  Primer
taatacgactcactatagggagacgcttgaattcctcggcaaaatgat

SEQ ID NO: 442 - DNA, 48 bp, Artificial sequence
  Primer
taatacgactcactatagggagaattaatcagtaatcgcaagctggtg

SEQ ID NO: 443 - DNA, 48 bp, Artificial sequence
  Primer
taatacgactcactatagggagatagcttctgttcaagttggacatag

SEQ ID NO: 444 - DNA, 48 bp, Artificial sequence
  Primer
taatacgactcactatagggagactgccaccttctcgattgctatcct

SEQ ID NO: 445 - DNA, 48 bp, Artificial sequence
  Primer
taatacgactcactatagggagactcctgcttcacgttgacgtaaaac

SEQ ID NO: 446 - DNA, 48 bp, Artificial sequence
  Primer
taatacgactcactatagggagatccaactggcctcttaataccttat

SEQ ID NO: 447 - DNA, 48 bp, Artificial sequence
  Primer
taatacgactcactatagggagacataaaggatactgacatcgttgtg

SEQ ID NO: 448 - DNA, 48 bp, Artificial sequence
  Primer
taatacgactcactatagggagatgtacgataaggatggcatattggt

SEQ ID NO: 449 - DNA, 48 bp, Artificial sequence
  Primer
taatacgactcactatagggagagaaaatcgaagccaagagcattagt

SEQ ID NO: 450 - DNA, 48 bp, Artificial sequence
  Primer
taatacgactcactatagggagagaactcaaaacgatgctggtcaagt

SEQ ID NO: 451 - DNA, 48 bp, Artificial sequence
  Primer
taatacgactcactatagggagaaaatcaataggtccagtagatgggg

SEQ ID NO: 452 - DNA, 48 bp, Artificial sequence
  Primer
taatacgactcactatagggagagcgttcatacgaactgagcgatgtg

SEQ ID NO: 453 - DNA, 48 bp, Artificial sequence
  Primer
taatacgactcactatagggagagagtagggcaactcggtgcttatgt

SEQ ID NO: 454 - DNA, 48 bp, Artificial sequence
  Primer
taatacgactcactatagggagactatctgggcaagactgtgaccaac

SEQ ID NO: 455 - DNA, 48 bp, Artificial sequence
  Primer
taatacgactcactatagggagaggcacgagtaatcgaggtgtagaag

SEQ ID NO: 456 - DNA, 48 bp, Artificial sequence
  Primer
taatacgactcactatagggagaccaagaaggagatggcagacaagag

SEQ ID NO: 457 - DNA, 48 bp, Artificial sequence
  Primer
taatacgactcactatagggagacaatcgatttctgggctaggggaac

SEQ ID NO: 458 - DNA, 48 bp, Artificial sequence
  Primer
taatacgactcactatagggagatccacttcatcagcggtgcagtcct

SEQ ID NO: 459 - DNA, 48 bp, Artificial sequence
  Primer
taatacgactcactatagggagagagatcgtgcaggaccttcaccaac

SEQ ID NO: 460 - DNA, 48 bp, Artificial sequence
  Primer
taatacgactcactatagggagagcagaacttcgatctaagcgaccaa

SEQ ID NO: 461 - DNA, 48 bp, Artificial sequence
  Primer
taatacgactcactatagggagatcagctagcttcgactgaatgtctc

SEQ ID NO: 462 - DNA, 48 bp, Artificial sequence
  Primer
taatacgactcactatagggagaaaggtggccgatttgctggagtgta

SEQ ID NO: 463 - DNA, 48 bp, Artificial sequence
  Primer
taatacgactcactatagggagagaatcggtatagacacggcgggaat

SEQ ID NO: 464 - DNA, 48 bp, Artificial sequence
  Primer
taatacgactcactatagggagaagaggcctgctttccggacatcagt

SEQ ID NO: 465 - DNA, 48 bp, Artificial sequence
  Primer
taatacgactcactatagggagagtggacatgtctgctggatgggaac

SEQ ID NO: 466 - DNA, 48 bp, Artificial sequence
  Primer
taatacgactcactatagggagagataaagttcttgctacagtggaaa

SEQ ID NO: 467 - DNA, 48 bp, Artificial sequence
  Primer
taatacgactcactatagggagaaaaggtaaagcatttgaatcaggag

SEQ ID NO: 468 - DNA, 48 bp, Artificial sequence
  Primer
taatacgactcactatagggagatcagtctagaagaggaggttcaata

SEQ ID NO: 469 - DNA, 48 bp, Artificial sequence
  Primer
taatacgactcactatagggagacaactattctctttgcctgtaagtg

SEQ ID NO: 470 - DNA, 48 bp, Artificial sequence
  Primer
taatacgactcactatagggagaggtctggagagcgtcaagaaggaat

SEQ ID NO: 471 - DNA, 48 bp, Artificial sequence
  Primer
taatacgactcactatagggagacgggcagcggaatatagatcaactg

SEQ ID NO: 472 - DNA, 48 bp, Artificial sequence
  Primer
taatacgactcactatagggagaccgcaatctagccaacaagctctca

SEQ ID NO: 473 - DNA, 48 bp, Artificial sequence
  Primer
taatacgactcactatagggagaggcgcagtacgttattagcatccac

SEQ ID NO: 474 - DNA, 48 bp, Artificial sequence
  Primer
taatacgactcactatagggagaacgtgcgcatatatctgatcttgga

SEQ ID NO: 475 - DNA, 48 bp, Artificial sequence
  Primer
taatacgactcactatagggagaattaaggaccagcagcttggaaatg

SEQ ID NO: 476 - DNA, 48 bp, Artificial sequence
  Primer
taatacgactcactatagggagagcgatagcaagatatctggtgtttc

SEQ ID NO: 477 - DNA, 48 bp, Artificial sequence
  Primer
taatacgactcactatagggagagcttaggttgtccacattcttctca

SEQ ID NO: 478 - DNA, 48 bp, Artificial sequence
  Primer
taatacgactcactatagggagaaggtggtttctaccgagtgttcaaa

SEQ ID NO: 479 - DNA, 48 bp, Artificial sequence
  Primer
taatacgactcactatagggagatctgtcaacatccacatggacatac

SEQ ID NO: 480 - DNA, 48 bp, Artificial sequence
  Primer
taatacgactcactatagggagatccgaaatggccgcacagggtatta

SEQ ID NO: 481 - DNA, 48 bp, Artificial sequence
  Primer
taatacgactcactatagggagagattgaaatggggcgagtccacatc

SEQ ID NO: 482 - DNA, 48 bp, Artificial sequence
  Primer
taatacgactcactatagggagaagatctactagtcgctgttaagatg

SEQ ID NO: 483 - DNA, 48 bp, Artificial sequence
  Primer
taatacgactcactatagggagaaagcgagaacttgttgtacagtatg

SEQ ID NO: 484 - DNA, 48 bp, Artificial sequence
  Primer
taatacgactcactatagggagacaagccgacaattcagtgggacaag

SEQ ID NO: 485 - DNA, 48 bp, Artificial sequence
  Primer
taatacgactcactatagggagactgcaggctgtgtcatcggatttct

SEQ ID NO: 486 - DNA, 48 bp, Artificial sequence
  Primer
taatacgactcactatagggagaggcggataacttcgttcagaatgtg

SEQ ID NO: 487 - DNA, 48 bp, Artificial sequence
  Primer
taatacgactcactatagggagagataggcgggcttcttcatccagtc

SEQ ID NO: 488 - DNA, 51 bp, Artificial sequence
  Primer
taatacgactcactatagggagagcgccaaagtacgagccaccacgttaca

SEQ ID NO: 489 - DNA, 48 bp, Artificial sequence
  Primer
taatacgactcactatagggagacatgtcgacgaccggagaggtggga

SEQ ID NO: 490 - DNA, 48 bp, Artificial sequence
  Primer
taatacgactcactatagggagaagctgcacattgacgatacggagag

SEQ ID NO: 491 - DNA, 48 bp, Artificial sequence
  Primer
taatacgactcactatagggagaatgccgacaagctcttggtcacagt

SEQ ID NO: 492 - DNA, 48 bp, Artificial sequence
  Primer
taatacgactcactatagggagacacaatctcatgtatccggtgttca

SEQ ID NO: 493 - DNA, 48 bp, Artificial sequence
  Primer
taatacgactcactatagggagaaattggatgtgaacttggcggagta

SEQ ID NO: 494 - DNA, 48 bp, Artificial sequence
  Primer
taatacgactcactatagggagagggtgcttctctaaggtaacaaaag

SEQ ID NO: 495 - DNA, 48 bp, Artificial sequence
  Primer
taatacgactcactatagggagattaggataggctcgatgatgtctcc

SEQ ID NO: 496 - DNA, 48 bp, Artificial sequence
  Primer
taatacgactcactatagggagacctttagatgcgttcgatccaacaa

SEQ ID NO: 497 - DNA, 48 bp, Artificial sequence
  Primer
taatacgactcactatagggagaatgacatgatccgctgtgattacct

SEQ ID NO: 498 - DNA, 48 bp, Artificial sequence
  Primer
taatacgactcactatagggagaccttcagagctgtacgaacttacct

SEQ ID NO: 499 - DNA, 48 bp, Artificial sequence
  Primer
taatacgactcactatagggagaagatggacggcgctttacttgattg

SEQ ID NO: 500 - DNA, 48 bp, Artificial sequence
  Primer
taatacgactcactatagggagagctctacaaggtggacgtgaacatc

SEQ ID NO: 501 - DNA, 48 bp, Artificial sequence
  Primer
taatacgactcactatagggagaagagcaacgaattggactcgggaca

SEQ ID NO: 502 - DNA, 49 bp, Artificial sequence
  Primer
taatacgactcactatagggagaacgatcagagtcaaaagcacggatgg

SEQ ID NO: 503 - DNA, 48 bp, Artificial sequence
  Primer
taatacgactcactatagggagatgaccttaaagtgcagcttcaactt

SEQ ID NO: 504 - DNA, 48 bp, Artificial sequence
  Primer
taatacgactcactatagggagaaaaaggttgttcagtgctttgagaa

SEQ ID NO: 505 - DNA, 48 bp, Artificial sequence
  Primer
taatacgactcactatagggagaacatgaccaaacttttgcagatagt

SEQ ID NO: 506 - DNA, 48 bp, Artificial sequence
  Primer
taatacgactcactatagggagaacatgagctggaacctgctggaaaa

SEQ ID NO: 507 - DNA, 48 bp, Artificial sequence
  Primer
taatacgactcactatagggagactcagccgcttgatcagcataagaa

SEQ ID NO: 508 - DNA, 48 bp, Artificial sequence
  Primer
taatacgactcactatagggagagtgccaccgaaaccagcatacacct

SEQ ID NO: 509 - DNA, 48 bp, Artificial sequence
  Primer
taatacgactcactatagggagatccgctgttggagatgccgctctct

SEQ ID NO: 510 - DNA, 48 bp, Artificial sequence
  Primer
taatacgactcactatagggagaacgtggctggtgcgaatgtatttct

SEQ ID NO: 511 - DNA, 48 bp, Artificial sequence
  Primer
taatacgactcactatagggagatgccgcactgatatgatgttctgtg

SEQ ID NO: 512 - DNA, 48 bp, Artificial sequence
  Primer
taatacgactcactatagggagagaaccattgccaagcagattcagat

SEQ ID NO: 513 - DNA, 48 bp, Artificial sequence
  Primer
taatacgactcactatagggagatgaatgacatccagttccgagttgt

SEQ ID NO: 514 - DNA, 48 bp, Artificial sequence
  Primer
taatacgactcactatagggagagaccggcgatcaatgtgtcacacag

SEQ ID NO: 515 - DNA, 48 bp, Artificial sequence
  Primer
taatacgactcactatagggagaactggaactttccgtggcaaggagg

SEQ ID NO: 516 - DNA, 48 bp, Artificial sequence
  Primer
taatacgactcactatagggagaatgtttaccacgccaccagccacaa

SEQ ID NO: 517 - DNA, 48 bp, Artificial sequence
  Primer
taatacgactcactatagggagaatggtccggttgtcgccacctttta

SEQ ID NO: 518 - DNA, 48 bp, Artificial sequence
  Primer
taatacgactcactatagggagactattgtggtggagacacttggtga

SEQ ID NO: 519 - DNA, 48 bp, Artificial sequence
  Primer
taatacgactcactatagggagaggagtaggtgtacttgtgactgttg

SEQ ID NO: 520 - DNA, 48 bp, Artificial sequence
  Primer
taatacgactcactatagggagagcaacaaacacaggaaaggctgaag

SEQ ID NO: 521 - DNA, 48 bp, Artificial sequence
  Primer
taatacgactcactatagggagaggatatgaggtccgatctggtttga

SEQ ID NO: 522 - DNA, 48 bp, Artificial sequence
  Primer
taatacgactcactatagggagatctaccaaatcctgccgcgtcctgt

SEQ ID NO: 523 - DNA, 48 bp, Artificial sequence
  Primer
taatacgactcactatagggagaggtggccgaggacacatgtatcttg

SEQ ID NO: 524 - DNA, 48 bp, Artificial sequence
  Primer
taatacgactcactatagggagagtaccacgaatgtgatggcgacaag

SEQ ID NO: 525 - DNA, 48 bp, Artificial sequence
  Primer
taatacgactcactatagggagaccatcaacattcggggctgacaagt

SEQ ID NO: 526 - DNA, 48 bp, Artificial sequence
  Primer
taatacgactcactatagggagacgaggcagagaactttggtgactac

SEQ ID NO: 527 - DNA, 48 bp, Artificial sequence
  Primer
taatacgactcactatagggagaagcatgcactcatccgcacagaagt

SEQ ID NO: 528 - DNA, 48 bp, Artificial sequence
  Primer
taatacgactcactatagggagaaatggatgtgaaggcgaaagtatta

SEQ ID NO: 529 - DNA, 48 bp, Artificial sequence
  Primer
taatacgactcactatagggagagtatactgggcacaaagttaaacat

SEQ ID NO: 530 - DNA, 48 bp, Artificial sequence
  Primer
taatacgactcactatagggagacgttcagcagaagtgtggtcaggtc

SEQ ID NO: 531 - DNA, 48 bp, Artificial sequence
  Primer
taatacgactcactatagggagaccgtccgctggcagttgtacaggat

SEQ ID NO: 532 - DNA, 48 bp, Artificial sequence
  Primer
taatacgactcactatagggagaactcaaccagacggcgattagtcag

SEQ ID NO: 533 - DNA, 48 bp, Artificial sequence
  Primer
taatacgactcactatagggagaaagcaggagaacaaggtcacccaca

SEQ ID NO: 534 - DNA, 48 bp, Artificial sequence
  Primer
taatacgactcactatagggagatgccggaactgcagggaattgtgat

SEQ ID NO: 535 - DNA, 48 bp, Artificial sequence
  Primer
taatacgactcactatagggagagagctgacggcttcgatgaagttga

SEQ ID NO: 536 - DNA, 48 bp, Artificial sequence
  Primer
taatacgactcactatagggagaggagggaccacgtgagaaactgaat

SEQ ID NO: 537 - DNA, 48 bp, Artificial sequence
  Primer
taatacgactcactatagggagaacggcgctttgcattagaggagtgt

SEQ ID NO: 538 - DNA, 48 bp, Artificial sequence
  Primer
taatacgactcactatagggagaacgcacttggaagaaattcactatt

SEQ ID NO: 539 - DNA, 48 bp, Artificial sequence
  Primer
taatacgactcactatagggagatagaatacacaattttgcgtgtctg

SEQ ID NO: 540 - DNA, 48 bp, Artificial sequence
  Primer
taatacgactcactatagggagaacagaagatccaccggggtgtgtaa

SEQ ID NO: 541 - DNA, 48 bp, Artificial sequence
  Primer
taatacgactcactatagggagactgattttgccgctgctccagattg

SEQ ID NO: 542 - DNA, 48 bp, Artificial sequence
  Primer
taatacgactcactatagggagaggttcattgtggagcgcgacagtcc

SEQ ID NO: 543 - DNA, 48 bp, Artificial sequence
  Primer
taatacgactcactatagggagactccacgggatactcgctgttgaag

SEQ ID NO: 544 - DNA, 48 bp, Artificial sequence
  Primer
taatacgactcactatagggagaattaagcgcatcaacctggagaagt

SEQ ID NO: 545 - DNA, 48 bp, Artificial sequence
  Primer
taatacgactcactatagggagaccaaatgtccgccttaaagtcatag

SEQ ID NO: 546 - DNA, 48 bp, Artificial sequence
  Primer
taatacgactcactatagggagaccggatacaacgtgacctcactgga

SEQ ID NO: 547 - DNA, 48 bp, Artificial sequence
  Primer
taatacgactcactatagggagacacctcttccgccaatctggtaggt

SEQ ID NO: 548 - DNA, 48 bp, Artificial sequence
  Primer
taatacgactcactatagggagagaggaatctgtcacagacttttgga

SEQ ID NO: 549 - DNA, 48 bp, Artificial sequence
  Primer
taatacgactcactatagggagacgtttaggaagtagccgggaataat

SEQ ID NO: 550 - DNA, 48 bp, Artificial sequence
  Primer
taatacgactcactatagggagaattttgccgctgattggtggagttt

SEQ ID NO: 551 - DNA, 48 bp, Artificial sequence
  Primer
taatacgactcactatagggagacagcaggaataggagctatactatg

SEQ ID NO: 552 - DNA, 48 bp, Artificial sequence
  Primer
taatacgactcactatagggagagagttacttcgtctattccagtgtg

SEQ ID NO: 553 - DNA, 48 bp, Artificial sequence
  Primer
taatacgactcactatagggagatacttctcagccaggctaaggaaat

SEQ ID NO: 554 - DNA, 48 bp, Artificial sequence
  Primer
taatacgactcactatagggagaccaccaccaaacagtgcctagagat

SEQ ID NO: 555 - DNA, 48 bp, Artificial sequence
  Primer
taatacgactcactatagggagaccttcaagctcatcattagggtgtc

SEQ ID NO: 556 - DNA, 48 bp, Artificial sequence
  Primer
taatacgactcactatagggagaaggagctcacctaccagcagtttgt

SEQ ID NO: 557 - DNA, 48 bp, Artificial sequence
  Primer
taatacgactcactatagggagaccactaatttgggcggaatctggga

SEQ ID NO: 558 - DNA, 48 bp, Artificial sequence
  Primer
taatacgactcactatagggagaagctgtactacgccgctgagaagta

SEQ ID NO: 559 - DNA, 48 bp, Artificial sequence
  Primer
taatacgactcactatagggagaacagcggagtttctgcatccactgt

SEQ ID NO: 560 - DNA, 48 bp, Artificial sequence
  Primer
taatacgactcactatagggagagcgaatccaatgtcacggaatacaa

SEQ ID NO: 561 - DNA, 48 bp, Artificial sequence
  Primer
taatacgactcactatagggagatggcaatgactatatagggcagaca

SEQ ID NO: 562 - DNA, 48 bp, Artificial sequence
  Primer
taatacgactcactatagggagaccactgtgttggccagcatgggtat

SEQ ID NO: 563 - DNA, 48 bp, Artificial sequence
  Primer
taatacgactcactatagggagagtgtgcggtcctaagcgacacaaat

SEQ ID NO: 564 - DNA, 48 bp, Artificial sequence
  Primer
taatacgactcactatagggagaaaattagggccaagaccgagtcaat

SEQ ID NO: 565 - DNA, 48 bp, Artificial sequence
  Primer
taatacgactcactatagggagacgaaatttgaggtcacgaaagtggt

SEQ ID NO: 566 - DNA, 48 bp, Artificial sequence
  Primer
taatacgactcactatagggagaggccaccgagcagaactttaactgg

SEQ ID NO: 567 - DNA, 48 bp, Artificial sequence
  Primer
taatacgactcactatagggagacggccagcttaccagaggtcaacat

SEQ ID NO: 568 - DNA, 48 bp, Artificial sequence
  Primer
taatacgactcactatagggagagtatattgcattgctggcgtttctg

SEQ ID NO: 569 - DNA, 48 bp, Artificial sequence
  Primer
taatacgactcactatagggagatgccgcagtaaatgccgaagttgat

SEQ ID NO: 570 - DNA, 48 bp, Artificial sequence
  Primer
taatacgactcactatagggagatgagctggtgcaaaagtacgtgggt

SEQ ID NO: 571 - DNA, 48 bp, Artificial sequence
  Primer
taatacgactcactatagggagaggcttcgaggaaatccttctctgtg

SEQ ID NO: 572 - DNA, 48 bp, Artificial sequence
  Primer
taatacgactcactatagggagaaacagcaactgcaggccttgagggt

SEQ ID NO: 573 - DNA, 48 bp, Artificial sequence
  Primer
taatacgactcactatagggagaatacgtgcgctggcgatacgacttg

SEQ ID NO: 574 - DNA, 48 bp, Artificial sequence
  Primer
taatacgactcactatagggagatcaactgccagcaaaggagaacttg

SEQ ID NO: 575 - DNA, 48 bp, Artificial sequence
  Primer
taatacgactcactatagggagataagcttgcggcagtacttagtgtc

SEQ ID NO: 576 - DNA, 48 bp, Artificial sequence
  Primer
taatacgactcactatagggagacaccaagtatatagccgagtccaga

SEQ ID NO: 577 - DNA, 48 bp, Artificial sequence
  Primer
taatacgactcactatagggagatcagtgggtgcaatggaggactttt

SEQ ID NO: 578 - DNA, 48 bp, Artificial sequence
  Primer
taatacgactcactatagggagagttgcacaagctgcgccaggacaat

SEQ ID NO: 579 - DNA, 48 bp, Artificial sequence
  Primer
taatacgactcactatagggagacaccacgtaagcagagtccgtcagt

SEQ ID NO: 580 - DNA, 48 bp, Artificial sequence
  Primer
taatacgactcactatagggagaattcactaggagctcacattatggg

SEQ ID NO: 581 - DNA, 48 bp, Artificial sequence
  Primer
taatacgactcactatagggagacacgttttaagcctaggatcaacag

SEQ ID NO: 582 - DNA, 48 bp, Artificial sequence
  Primer
taatacgactcactatagggagaacacgaacgagagcttatataccac

SEQ ID NO: 583 - DNA, 48 bp, Artificial sequence
  Primer
taatacgactcactatagggagaagaccactttggcaatatgcagagt

SEQ ID NO: 584 - DNA, 48 bp, Artificial sequence
  Primer
taatacgactcactatagggagacggaccacttcaaatatcagatgtg

SEQ ID NO: 585 - DNA, 48 bp, Artificial sequence
  Primer
taatacgactcactatagggagaggaaactcggaatttgtaggtttgg

SEQ ID NO: 586 - DNA, 48 bp, Artificial sequence
  Primer
taatacgactcactatagggagaatggcagtggcaatggaacgacaac

SEQ ID NO: 587 - DNA, 48 bp, Artificial sequence
  Primer
taatacgactcactatagggagaggtttgtggctgcctttgcgtctgg

SEQ ID NO: 588 - DNA, 48 bp, Artificial sequence
  Primer
taatacgactcactatagggagaagcgcaagagcagtgtgagcagtga

SEQ ID NO: 589 - DNA, 48 bp, Artificial sequence
  Primer
taatacgactcactatagggagacgccagcacaaagttcagcttggac

SEQ ID NO: 590 - DNA, 48 bp, Artificial sequence
  Primer
taatacgactcactatagggagacttctttctggccgtttgtccacct

SEQ ID NO: 591 - DNA, 48 bp, Artificial sequence
  Primer
taatacgactcactatagggagagcttatcgatctgaacaccgaccac

SEQ ID NO: 592 - DNA, 48 bp, Artificial sequence
  Primer
taatacgactcactatagggagatctactcgaatttcaaccagtctct

SEQ ID NO: 593 - DNA, 48 bp, Artificial sequence
  Primer
taatacgactcactatagggagatcataccaaatacgattcaccacac

SEQ ID NO: 594 - DNA, 48 bp, Artificial sequence
  Primer
taatacgactcactatagggagacacgggcgatagtctggagcagagt

SEQ ID NO: 595 - DNA, 48 bp, Artificial sequence
  Primer
taatacgactcactatagggagacggaatggggctggccttcggattt

SEQ ID NO: 596 - DNA, 48 bp, Artificial sequence
  Primer
taatacgactcactatagggagaccgcgaatccgatggcataatggtg

SEQ ID NO: 597 - DNA, 48 bp, Artificial sequence
  Primer
taatacgactcactatagggagataggacacggcggcctcatttgact

SEQ ID NO: 598 - DNA, 48 bp, Artificial sequence
  Primer
taatacgactcactatagggagaatgaaataccgacaggagcacaata

SEQ ID NO: 599 - DNA, 48 bp, Artificial sequence
  Primer
taatacgactcactatagggagacgaacttcatagggttctcaaagta

SEQ ID NO: 600 - RNA, 21 nt, Artificial sequence
  siRNA targeting the Photinus pyralis (GL3) luciferase gene
aacuuacgcugaguacuucga
